United States Patent Application Publication US 2026/0366032 A1, published November 19, 2026 (application 19/146,468).

The application's sequence listing, which the Patent Office published only in electronic form, follows.

SEQUENCE LISTING (9815 sequences)

SEQ ID NO: 1 - DNA, 515 bp, synthetic construct
  source 1..515: mol_type = other DNA
tcacacctttaccacaacagctgtttacccagcactgaaggcggctgccaaccacaacatgaggaatacatttcctcttcagaatgggtgttggtggtgtgtgggtgccaatgcagcgtggggactgtggcctcacacatgagtaagagctggtgtcctatagccttcaatgcctgtcaaataactgtggaacatgttcagcccacacacgttgagactcctcctcagactcctaggcgggcgctgcgatggaggccgagggcctggactggctcctggtgccactgcaccagctggtgtcctggggcgcggccgcggccatggtcttcggaggggtggtgccctacgtcccgcagtatcgggacattcgcaggacgcagaacgccgacggcttctccacctacgtgtgcctggtgctgctggtggccaacattttgcggatactcttctggtaagttgggggcaaagaaagttgacagacaatccgtaggcctactgcgtctacgccacccgca

SEQ ID NO: 2 - DNA, 515 bp, synthetic construct
  source 1..515: mol_type = other DNA
agctctaacttatagatgtacttctgtcaatacagtaattgggctaagctttgtaatttttactgttccttagcaacagtttgctcggaacctccaacattggtttttacagaatagtcatatgtgaagtcaatgctttatcccttaccttctggtacagtcagaaggcgaaagtaacagactaaaacagaatgcttcacagggctttgaaatagatgctatcatatttttcctactaaatagatcaggctcactaccaattagcatcatcttaatcttgcctaatagtgaagcaaagtcaccaaggatttggtggatttatcagctcctcccacaatagtcatctgaggctaacacctcttggaacctagatcgaaagtcctttggtaatgatgtgtcatacattctagtcatcaaagacaccattttctgggcctgaagtgttctgctggtttttggaggaaaaagaaagttgacagacaatccgtaggctcggcgacaaccgcctctacttc

SEQ ID NO: 3 - DNA, 515 bp, synthetic construct
  source 1..515: mol_type = other DNA
gagttgcatttgtatctttgtcaatacaatatcatcttaccttgatacaccactacatgtcttggctatatgacatcagtgtcttgcacaatggtattgtggaaaggtcaatactgtgccaacccacctacagcctcttctgagggtacccatcctgcccacactttctgctgaagggacaggcccaggaagccatactcagtacccagtgccccacttcctctatccattcctcagcctcaaactcctgggcccagcatacctggctaattttaaaattttttgtacagatggaatcttgctttgttcctaaggctgaccttaaactcttggccccaaggcatactccctcctcagcctcccaaagtgctgaggtcacaggcatgtgacactgtgcccagcctccccttcaggtcttcattctgcagtctcctgtgtacgtgtaaaattatgatcaaataaataaagaaagttgacagacaatccgtaggccgtcgcccacgcctccatcatct

SEQ ID NO: 4 - DNA, 515 bp, synthetic construct
  source 1..515: mol_type = other DNA
cctacactgtgcccatttaaagattaatagtatatgctttagaatagtgctttactaatatgattatgaatcataagtataatagcttgtgcttagtacaacaataagagaatcaggcggtgagcttgcttgactgaccacagagtggaacaaacaaccacaggaagtctgcggagcctctgagcaagaaagttggcttattgctcaaccttccacttgagtgcctgaactcctgatgcagtgaagtcacaggttccgtgatgtcacaggtgggcaggcgcactggtctgtaacggattggcttggccttacccacgaggctttgcggtggctgttggcttggcggtggtcgcttggcttggcgtggcagtgatcgcttggcttggcatttctggcttggcggtcctcctttcgcagattggaaaccgcgggctatcctgctgggaggttgtggccgaggcagtaaagaaagttgacagacaatccgtaggccaaccgcgtcgacgccagcttca

SEQ ID NO: 5 - DNA, 515 bp, synthetic construct
  source 1..515: mol_type = other DNA
atgaggattaaatgagataatctgtgaagaattatatatggcatgaacaagtcatatataaagtgctgagtaaacttcagatactgaagttacacagcagactgtgggctcctccaacgcaaagactgggtcttattcatctctgcaacttttttgcctagcacgaagtctggctgaatatttggtacaaaatacatgtttactggataactaaataatcgcaataattatcctggcacagccgagaagtaagccctgccagctctcccgggtgcggggacgcgcgcgcccaccttcgcaaacgagacttccgggatcccggagggggcggaagtcgaggcctctctcgcttccggctcggccattgtttttggtctaacgggcagtagagtgtccggcttcggtgccgagtgccaccgcgagtgggccgagacgcggagggaggcgcggccggagctcgggtcaaagaaagttgacagacaatccgtaggctcgtcttcatctgccaccccttc

SEQ ID NO: 6 - DNA, 515 bp, synthetic construct
  source 1..515: mol_type = other DNA
aaggtaataaataaagtcaaattagaggtacaaaggcagttgataggtacccaaagggaagaccaaacagcagtgtctgtcagagaaaatgccagcaggggacacctcctgaccatacctcctgctgaggcggaaggtgtgccgttggtggttgacaaagatgttttttctgttgaaacaccaaagaaagaacatcaacctctaagaaacacttcctttacatgtcagaatcctaataaaagcatcagtattgcaaagactttccatgatcctatacccacctcgaaagccccctctcaccacaggaagtgcactgaccattggaggcataaaagagatcctcaaagagcccgatcctcactctccctgcacagctcagcgggacctcagccatgagacttctcatcctggccctccttggcatctgctctctcactgcatacattgtggaaggtaagtggagaaaagaaagttgacagacaatccgtaggccctcgtcaccaacgacgacttct

SEQ ID NO: 7 - DNA, 515 bp, synthetic construct
  source 1..515: mol_type = other DNA
tccacttgccatgagctggttttgcaaagaagaaaacggtttcctttatatgtggagattaagaacaagtttatctgtagttttggtgctcgactaactgggaaccaagccacagttgcttgtaaaacggaccctaagttatcttgatcttgatggttcagtgcttggaaatctctggggctttcggtgcctggtaaaagttcaatcacttatctgatttgtggttggcatcctccagctgcactccccactctctgtcaccaggagctgccgggtgcctgggatatcctggcagctctgctcaaaatgatctacgacttcatgaatttatttggctcctcctcggggccagggtgagtgtcatgggttaataaggccggccccgccttcaggagcggtccactgggagatgtgtgctgcgcagccctcttgcgaaagctctcccctggtgggacattctgggcaaagaaagttgacagacaatccgtaggcgcgactaccactgcatcggcgac

SEQ ID NO: 8 - DNA, 515 bp, synthetic construct
  source 1..515: mol_type = other DNA
aaggcattttacttcttgaaatatttagttttgacctgagaaaggggagaataaaacgtttgtactttgggggacagtatgagtgctggggtttctgtttcagtgcaggcttgtctatgagacatgcatatgcataacttcatgcagggaaagtgtcgtgcacttttctctcgctgaagtttacttccggggtgacttagtttttctgatcagtttagatgttcatatcttcctgcttctggaatgggggtctacaggtgtgaaaggtcagcccccctgagggagaggtggggcccgagcaggctcctcccactgcgggagtgctggcctttcccctgcagggctgtggctctgggaccacttcctctttcttcactctgaagccaagagccgaccttctgagccctcaagaaagatcagaacagattcatgggtgatttagcctatctgtcccaggccagcgtaaagaaagttgacagacaatccgtaggctccagcgtccgccactgcaccta

SEQ ID NO: 9 - DNA, 515 bp, synthetic construct
  source 1..515: mol_type = other DNA
catgtacctgacgctttattgtttctctaacacaccagccagttctgacctcaaagccttcatgcttgctgtttttttccactcagcatgctctaccctagctgcctgtttcgttggcttcctcatttccttgaagtctttactcaaaacaccttctcagtcagacctctcctagccagtatttagaactgcaactcccaacactacccttccctgtcccagctctattatcctgaagccaggactcgatgcagattggctacggatccaaaacgcccactaaccttggcgcgtcccagtctccaccccaaacctaactcaggtgaaaatggcgccacgcgcgggggcggggctagaggtacaaagagagtgtctattggttgggagcggcacgggccgccttcttcgcttcaccattggctcgctccgtaaggcaagagaacccactaggggatgagcccgaaaaagaaagttgacagacaatccgtaggccgcagcttcagcgtcctcttcaa

SEQ ID NO: 10 - DNA, 515 bp, synthetic construct
  source 1..515: mol_type = other DNA
cagaatgatttatattcctttgggcatatacccagtaatgaaattgctgggtctgatggtatttctgtcttttggcctttgagaaattgtcttccacaatgactggactattttacactcccaccaacagtgtagaagtgttaatttttcttcataacctcactagcatctgttatttttgactctttagtagtagccattctgactgatgtgagatagtatctcattgttcctgggcagctgaggaggagctaccttaaaaaaggaggtgtgtgccagggagctgggtaggagcctggctatatatctgcccagcagcggtactctcgggacagagatggcactgatgcaggaactgtatagcacaccagcctccaggctggactccttcgtggctcagtggctgcagccccaccgggagtggaaggaagaggtgctagacgctgtgcggaccgtggaggagtaaagaaagttgacagacaatccgtaggcgcctctactgcttctacttcgtc

SEQ ID NO: 11 - DNA, 515 bp, synthetic construct
  source 1..515: mol_type = other DNA
gacaacctcggtgttctacaatagggaccaagaggaacaggcccaaaaggaaaagcaagatcagagaaaggcctcagccttagtcatagctctcagccttagtcatggccctcagacaaacaaaccttggtggttcagagaggaaagaaaatgaggcaggccaatcacttggtagggcttgttatcagtgtggtttacaaggacactttaaaaaagattgtccaatgagatcctttctaagccatttagaaatgactcactttgaaactcttcctgtgaggtcagatagtggtctagagcataagacttaacttattgccggaaacagagagagaacagaagaagagaaagctcagcaaattttcttgccatacttcatgacttcactgtggctaagtgtggggaccagacaggactcgtggagacatccaggtgctgaagccttcagctactgtctcagttttaaagaaagttgacagacaatccgtaggctcggctcctgccccctcagcttc

SEQ ID NO: 12 - DNA, 515 bp, synthetic construct
  source 1..515: mol_type = other DNA
attacagttgtctatggtgttcagtacagtaacatactgcacaggtttgtagtctaggagcagtaagttatgccatatagcctatgtgtgtaatagactataccatctaggtttgtataagtgcactctgtgatgttcacacaatgacaaaaccccctaaaaatgcatttctcagattgtgtcaccattgttgaatgatgcattattgtaatttaaagatgttgctccactccttcagaaagatatgcccaataacaagagactatccgagggcggtgcaaatggaaatattgaaagccgattggttcttccaagctggaagttgtggaggaaggactaatttggaaccaattgcgtggcgcctgagagcggcagcgcggtcagtggcggcgctgaagagaccggttgccgccatgatagaacagcagaagcgtaagggcccagagttgccgctggttccagtcaaagaaagttgacagacaatccgtaggctgcatcaactgcatctgctacgg

SEQ ID NO: 13 - DNA, 515 bp, synthetic construct
  source 1..515: mol_type = other DNA
gggtagaatttgatacaaagccactgctatgtgtgggaggctgagatcagaccagacatcagctttttaacatgaggaaggatgtggctgcatctcagacatgagacgtgcatgcatgaatgttaggaaggtttacagtgattcttagaaatgtaacctctaatcacagaatttagacctatgcctcctggtaaatttagaattgagcctttgttatggatgcattattttcctatatgaccaatgggagagtagacctaagctccttcatttgcatgcagacttcacgacaaaataacgaatcagagttggagaaactaaatcttcatttacataacattgtctacaaattccgaggatcaggagatgtagatttcattttctttcctaactgcagaacagcaaagatagcatgcctgagccagcgaaatccgctcccgccccgaagaagggctccaagaaggaaagaaagttgacagacaatccgtaggcacagcttcggctcctacagcacc

SEQ ID NO: 14 - DNA, 515 bp, synthetic construct
  source 1..515: mol_type = other DNA
atctcctcttgccattatctactaaacaatccctgcccaaaccatgtagaaacagaataagaaacttcagacatattttgcagtgaagcaggaaacctatcagatgacgtggccactttctcttgtaaacccactgagggtgtggggctggaatgcagctgccaacatgtctggttcctttctagctctgagcatcaccagtacttaaagggacttttcatgtagcatcatcctcaaagactggatgaatggacgatgtaccatagaggagagagagaggagcgtgtgtctgcacatcttcctgcagatcgcagaggcagtggagtttcttcacagtaaaggactgatgcacagggacctcaaggtctgtatttgtggagcatcacccttggggtttcaatctgacgttttgtgattcagagcagtacttgcagtactctgaaggatccttaagagttggggagaaagaaagttgacagacaatccgtaggccccgcaacagcgtctgcgtccgc

SEQ ID NO: 15 - DNA, 515 bp, synthetic construct
  source 1..515: mol_type = other DNA
gccacagtgcccggctccctgccccactttctgagacccagatccacttcctggtttcctgtgtggtcatgtgaccacacttggccaattggagccttttgttatcacaggcacagggattgggtcagggctgggcacgtgatcctgcctgagccaatcatgctacgagtttggagactccctggaagaaggcctagaagtaaggaaaaccatcttggacgcatgatgattcctccaccgcaacccgcccctttgcctactgcgcgggcagtttcttgcaaacccggaagcagatctcttggagtgaaggctgttagtcgccgcgtgagtttccctctatctagattaaacctgcgtttcggagtcccctgctcctccgtacccgatgtccgggggttcgtatagcccttaaagtccccgcacggctccctccattccatgtaaattcagactttgccgcgagaaaagaaagttgacagacaatccgtaggctcttctacaccctcttctgcgac

SEQ ID NO: 16 - DNA, 515 bp, synthetic construct
  source 1..515: mol_type = other DNA
caacaccattacctatattgtttgtgtttttccttaaggtctcttcttattacttgctagcctgacttgagtcatcaaatccaacaaaaatcacggtttacactctgcttcaggctagctgcgtttcatgtactatatctgactactacatctgaaacattcttcttggtagcatatttcagtcagagtatgaaaattttctatgactaaagtcactgtagtggccttattcctgaagcttctaaaaagccactgggaaagtactaaatctctgagactaaagagggcggactcagcctcacttcctccttcttctcatctgggcttcctgtcgtcacagcatgatcatattttttcacccttcacttctccttttacacaaatagccccggatatctgtgttaccagccttgtctcggccacctcaaggataatcactaaattctgccgaaaggactgaggaaaaagaaagttgacagacaatccgtaggcgacatcttcatctacgtcaacac

SEQ ID NO: 17 - DNA, 515 bp, synthetic construct
  source 1..515: mol_type = other DNA
aaaaagaggaagcccttggttacttacatttgtcagatactgtgtcagggagaaggatgatgactatctcacaggttcccttacctcgggcattaaagtagaaatgaacaatcagatgtggttaagaggggaaaaggttacatttcctttaattcagattaagcttgcactgcacccatgattgaacaagtgagttctctcagttcctcttgtcttggggagacctctaatccttgtacccagggcttttgacagccccgcaatttctgcaaatggttcctaattgattggcttcttctctgtaagggtgcctattactgtcatagctctttgtgtgaccctgtcagcctctcctgtagggggggatttttttccccagtattgttagcaattagcatgtgctattgtaatagtttggagtttgaaagaaatatacaatgtccctttgggtgaggaggttgaaaaaagaaagttgacagacaatccgtaggctccagctacgacaccttcttccg

SEQ ID NO: 18 - DNA, 515 bp, synthetic construct
  source 1..515: mol_type = other DNA
tgccattcattcaagcaaatatttgcttattgtctaccactgtgtactaaatacaagatccagaacttgctgtgtcctcactgttttaagtcagtatgcatcatccttccagcatgtgtaccatagcaaggtgtacagagcattgctaacctcaaaagctcacttgagctttggtgtccagggattttcttggggtttcattctgtagacatgattgatgagtcataagctcctggcgactatcagacatattaagctgtcagggaaagagcctgtttaatccagtcttcaatcacgggtttcctcgggcgttagccactgcctgcggagtgtggactggcagaaaaacgtcaccttcgggccccccagcaccaacgcgccttaaaccaagccccacaaagaagtcacttcggcgatgtaaacgcgactttgcggcttcctgggctgctaaggtgaaggacgccaaagaaagttgacagacaatccgtaggctctgctgccacagcaacctcatc

SEQ ID NO: 19 - DNA, 515 bp, synthetic construct
  source 1..515: mol_type = other DNA
gacaaatgattttggagttgttgcactaacttctgatgtgatacaggtctaacagtagttatgactataaaaccatacacagttttacaatcactatcaaccacttgctgagaggaaataactttttggaaccaggtataagactcacaaaaaggtcaagattcacaaaaagattaaatctacaatgaaataaactatcagcttctccatagtttgttctcaggggaatctcctcttcacaggcaactggtaaccacctcatttggggatgtttctgccttgctagcagtgccagagagaacttcatcattgtcacctcatcaaagactactttttcagacatctcctgtagggctagattcagagagcagcttctgatatttggagggtaagtgccagaaaagttactgtaatgttacatgtggagaatcaggactccagccacagtgacagataggcattgaaaagaaagttgacagacaatccgtaggcgctccgtcgacaacggcacctcc

SEQ ID NO: 20 - DNA, 515 bp, synthetic construct
  source 1..515: mol_type = other DNA
tttgttctcacgttggatctgtctctccctcttcttctccccactctgcgtgtacgtgcctgtgcatgtttgtttcgtcatctctgtgactacctacccacctaccactttatcactctttttttggtccagtcttcccccgtgtctgagactgttcatctgtggccctgccgctgttccaacctcggggactttccctcactgcacgtggttaaacactttgctgagagtcctctcaaagctgcctccgcctcctgactggagagcgaactagcccgggcggagccacagtcctagaggctgagcgcagtcggagctgtcccatttacccgacccgacgccggcgtgatgtggcttccgctggtgctgctcctggctgtgctgctgctggccgtcctctgcaaagtttacttgggactattctctggcagctccccgaatcctttctccgaagatgtcaaacgaaagaaagttgacagacaatccgtaggccccggcctcttctgccccggctt

SEQ ID NO: 21 - DNA, 515 bp, synthetic construct
  source 1..515: mol_type = other DNA
tggtgaccgccttcccttggcctccgctcagctaaacaatagacgagcaaagtgactcgatagcacagtctagtggaggcagctgggattgcatctctgagtcctggggctgatcaggtgccctctctggctccgcctccctctaaaccctctctccaccctcccagcactcagaacccggcagtcctaggtgagccaccgggaagactcctccaacctcaccgtagggatccttcccctggttgggggttgggggattgaggctttagaactgactttggaatgaagcaggaaaccaaccccaggatccagaccatgtgtagctaggtagggttcaagttgaagtcttgggggttgggcaggaagggggactctgctgcccctggccttgcctgagagatcttggttgatggagctgttgtcatgggaatggagagagcccgaacaggaagagggtacagcttaaagaaagttgacagacaatccgtaggccaactccttcgactccgtcaacc

SEQ ID NO: 22 - DNA, 515 bp, synthetic construct
  source 1..515: mol_type = other DNA
gggtctcgctcctgctctcactccagagcctctccagccctcccacgcttcccctctcgggtcccgccccaggactgctctgccctggcccttggccctgcccttccctgacccgcctccacccagctccagcctccctttgaccccacccctacccagctcccaaactgccagtttctatcggggcctggtcgcaactcgtattgctccgcccccacgcccaggccccgtcctatccaatcagggatggtgggctggaaaccatccaatcaggaacgcagctggagcgaagaggacggtttccgggtttggtgcggcctttgtctctcgctgcagtcagagctccaggtctggttcttctcctaaaggcccaggctgtgtggccccgtgtcctgcaggtattgggagatccacagctaagacaccgggacctcctggaagccaaaaatggtgagagtgagggtaaagaaagttgacagacaatccgtaggcaacctctacatcaccgacaaccg

SEQ ID NO: 23 - DNA, 515 bp, synthetic construct
  source 1..515: mol_type = other DNA
actcctaaccactagactgaattataaagaggtgacatgaaataagctctaataattgataatcctacctacacccctggaagtgagcctttcaacgtttctctgctttggttaccaggaactcccacttcctgggtgttcatgagattagaggaggcaaatgtatatgtcaacaggagctgggaggtggtataaatgtgtgaagctgctggctgtcaaaaacagttgcttcctcccgcgtttctctcctgccaccagctggggcctgccttttataggcgccgcagccaatgagcacgcttctttccttctgcccgcccgcctggccaatcgccgcgccccttgtgtaatctccggctagtcggctgctttcggctattttcgctgttgctggctttttcaggagctgctcgctcgcagccagagacgctgctttttttttccgggttcggagccgttccggaaaagaaagttgacagacaatccgtaggccctccgcgtctccctcgactcca

SEQ ID NO: 24 - DNA, 515 bp, synthetic construct
  source 1..515: mol_type = other DNA
ggtgaagaaagagtggttagaatggtttctccacaggtgacagctgaaacaagtcttgaaagaagagcaagactttgtcatgcaaatgaggggaagtacattctaggcagcactaatatatatcatgagtgatagcatgaaggagtaaaagcagtggtggtttatagaaactgagtgatttttgtgaatcatataggagagaggacaggagatgaggtggaaaaggtagatcctttattgaaaagaggaggagtcaaagatcctgaaagggttgggactgcctgcagtcagtccctagggaacttcctgttgtcaccacacctctgagtcgtctgagctcactgtgagcaaaatcccacagtggaaactcttaagcctctgcgaagtaaatcattcttgtgaatgtgacacacgatctctccagtttccatatgttgagattctacttattcatcagtttgttgaaagaaagttgacagacaatccgtaggctcaacctctgcggcagcatcatc

SEQ ID NO: 25 - DNA, 515 bp, synthetic construct
  source 1..515: mol_type = other DNA
ggcttggtgctgtcctcgtgatagtgagttctgctgaggtctggttgtttaagtgtgcagcttcactggtgcaatgctttctctgcttctgctttccccatgtgacatgctgctctcacttccccttccaccacaagtaaaagctctgacacctccccagaagctgagcaaatgctggtgccctgcttcctgtacagcctgcagaaccgtgagccacttaaacctctttttcctacaggaattggaaaagggtaggaatgggggaggagatgccagatcagccctgagaacctctttacccatctcaaagacttgggacactaatgggaaaggctgggctaacttctgctgcccttccccactgtctgtccaggggaacctgggaaagacaaataggagctgaatccttcactgaaagccccgtcatcgtatctatgggttgggcattaggaacggcctggcccaaagaaagttgacagacaatccgtaggccacgtcatcagcggcttctacaa

SEQ ID NO: 26 - DNA, 515 bp, synthetic construct
  source 1..515: mol_type = other DNA
tgcatgttttttaagacaacagcttttgctttagtagttgggcggtcgcaagtgaacactgtccagtggttcttctggtgcccagactcggaggagatgggactgctctcaatgtgtttgttagaaacgaaactgttcgcactataaccccataaccccttacaatgttcagaaaaaaacaagaaggggcttgaaatacccactagtgtgccgcctgctcagcccatctgtccttctgcttttgtgaagtttcctgctagcagtttagagattgggctgtttcctcactgatacatatcccttcacacttctataatttaactctctcaactgcatgtgaaagatcttagctgaagatgactgacagtgttatttattccatgttagagttgcctacggcaacccaagcccagaatgactatggaccacagcaaaaatgtgagttaaccaaggtagcatggaagaaagaaagttgacagacaatccgtaggcctgcatcttcgtctactccaact

SEQ ID NO: 27 - DNA, 515 bp, synthetic construct
  source 1..515: mol_type = other DNA
ggttgcagtttactaaggccagccaaccccacaatccttataattcgcattcccccatactgttcaaatgcagaaactagtgattcatctgtcatctgtacctcattttcatctactagaggtgagccttttgatagtgatactggtcactggtgagtcactagttccagagtcccattctgaacatatacttcctgtagcaactctcttagcttgtgttttctcagaaatcctgtggggagaaaggaggcccttgggcactgtctgaaaagtgcgatgccaaatgatctttagggacagacagtaaattatatcccttgctaaaatacctctcggtagcgaaccaccaaacgtttcttttttaagccccgcctctcagccgttacgcctagttcggctgtctctgattcaggaagctggcagttcccacttactcctccccagcaagagctaacagccctcctaaagaaagttgacagacaatccgtaggccgtcaacaccttcagcgactacg

SEQ ID NO: 28 - DNA, 515 bp, synthetic construct
  source 1..515: mol_type = other DNA
ggtcataattatgcctaacataaaacaacaatccttcatacaactggagacgcaccaatccccaacccaaatgctattacataaagttaacaacacttaaatgttgacgtgaagttaataaatcttatgtcacatgataaaggagaaaggaaataaaatgaaagtattttcttagtacaagcgtatatatgcgcagacgtgtttttaacaaaagaaagaggaaatacttatccttatcagaggaaatttttgctaaccttccgagttgtctcagagccaaacgtagtaagctacctgtcaccggatgtgcttgagctaagggcgctgaaccacctctgtcagagacggtgcatcccccaccggatgtgaccccgggatgcggagcctggggtcagatctgcgagccagataacagcggcactcacttctcgggtcttcgtgagcattaagtcaatgaacccaggaaagaaagttgacagacaatccgtaggcctacggcgaccacagccgctgcg

SEQ ID NO: 29 - DNA, 515 bp, synthetic construct
  source 1..515: mol_type = other DNA
aacgtctcccaccaggctccacctctaacatgggggatgacatttcagcatgaaatttgggggaacaaatatctaaactattcacaccttactaataatactaaatgtgcacagttaaatttcagataaagattgttcaattggggcagacacgtaattttttccattgctctttgggactcagatgaataatcttagtgtggtagagataagcctagctggtttgtcattccttctgggtgttagaatagactgacagcgcctggagatgggggtgggaagaatatgaatattatgggatgcctggctcgaagggtataggggtggtagagtggagatgaagcattatgggatgtgacactgggttgtgttgggagtattatggtatgtttggttgaccacgggctccttgcaattattatgggatgtcaggatgtgggtaggagagtaaaattattatgggaaaagaaagttgacagacaatccgtaggccacgtcctcagccacagctccag

SEQ ID NO: 30 - DNA, 515 bp, synthetic construct
  source 1..515: mol_type = other DNA
ctgaatactcgtgcttcctactttgatcttctcctgaaacacgaaatgaatcagttctttctcatttgtgacctttcagatgtttaaatgcagctgtcatgtctgactacttggcacattacaacattctactgacccaggtctcctgtctctgagttaccttttattccagttttcagctctaacaggacccttgtagacttcttatttcctccttttctttaacctcttccttgaccgcccccgcccctcccgcctgctgtcgcccagctccgcccctccagggccgtgtcccgccaagctcctccccgctcgacttttccttccggaccccatcccttcaagccccaccccctgcaggggctctccaggcttcccaaccaggtccagctccaggccctgttccctgtccccagatcacaccgagtcagcagccttccctagacccgccgcttcctcgctccaaagaaagttgacagacaatccgtaggcttcatctactaccactactccaa

SEQ ID NO: 31 - DNA, 515 bp, synthetic construct
  source 1..515: mol_type = other DNA
tatttgccaccaggcagaacagaatgagcattggtagagaaggctccctcttggtatgttactgataaacttgtacttcctcatacttgtttgtggttctactgacttatttccaaacttaagagtaatgtacttcgaaaacaacttggttattctttaaatttcaggtaaaaccccttttcctaacactcatcttatttccactgtcttatttcctctcagatgttcattcctttggtttctcacacaaaccctgctgtggctgcttaccatcctcagcaagggtgcggaggaatggaaacttttgccaccaacagcatttgctagcaacttccctctctgtggtttttctgtcattcccttgataaaagaacttgagctgcgcaaaagtaaccaatcttcaccaatctcatcttcacatataaacagccgcctttcaagaagcaagctgccagaaaaatgataaagaaagttgacagacaatccgtaggccggcgtctgctgcaactacaaca

SEQ ID NO: 32 - DNA, 515 bp, synthetic construct
  source 1..515: mol_type = other DNA
tcttaaaatgctgagattgcatagtagcttttgggtagaagttaaaaaaccaaaccaaaacaagaacctccaaaaataacaaagtgctggattacaggcatgagtcacagtgagccacgatgcccagtctgtctctcatacacacacatacacacaaacagatacaggttgtaacttacttttttttttttttttaaccatttgtagaaggctattagtccatgtcagaatcctagaaaaaaacgcacacaggcggcggccccaaaccgttgccgcccacttacctcagctctggctttacactggtagccgccttcccctctgcagccgaaaccaacttccggtctcctccgggaagaagccaccgactctgtccttgattggctgtaagagctgtcctttaacgaaattctagctccgcctcagaccgatccctcgctgttgcgcctacgtatgtttgactcaaagaaagttgacagacaatccgtaggctccctcttcttcacccacttcat

SEQ ID NO: 33 - DNA, 515 bp, synthetic construct
  source 1..515: mol_type = other DNA
aactcttggtgtctgtagagtcaggagaaagaagtatgtgtgaaaagttaacaaaattttgagaaattggaattgaaagttaagtgatagagtgtgtgctttcaaatttagtcatataaacactgaaacccaaaccaccagagccttctgtgcggagctttttgtggtgttcttattcttatactgccagtcttggctttgttaactcgtttgagttttggagaactaactccttaacacccatgtcaatacttcccagtgaacgcacgtgttcgaccttttatttaaatttccatttcatcacagcaataagacactcggggcggtgcattttctgtgaaatgactactgtccggggcccgaggtgctgcctcgcacaatgcatcaaaggaggttgtgtccgtggtcgtaacctcttcgcgtgaaaggcaccgcctggtccagtctttgtgaaggaacaaaataaagaaagttgacagacaatccgtaggccgcggctacgacatcctcggcac

SEQ ID NO: 34 - DNA, 515 bp, synthetic construct
  source 1..515: mol_type = other DNA
tgtcttctaactctgctaccaccaccctcgttcaggttttgtagtaagtatctgtggttttgtctgtcaggagtcttccttccggtgggcactgcctctcctcccattctattcatgtggttcctactggagattgcatgcccatatttgacctaccctatctgtctatggttgataggtctgcaggcagtcatgtggcccgaagtgggacagtgagtttcttcttactttccttggtcccgctactggacccatttcctacctgggaaatggagtcgaagctgactcaaaacgtaacggcccaattgtccttgagacttcattccccagcaagctcagcgtgtaacgtgcgctatggagccgaaagtcgcagagctgaagcagaagatcgaggacacgctatgtccttttggcttcgaggtttaccccttccaggttagtttatccctcctgctgttctagggaaagaaagttgacagacaatccgtaggcagcggctgcgacggcaacctcaa

SEQ ID NO: 35 - DNA, 515 bp, synthetic construct
  source 1..515: mol_type = other DNA
ggcccaaccctatggcttcagattcagtaagcctgggctggggctggagaatgtgcaattctaacaagtttcaggtgatgctgttgctgccactcaagggaccagcactgagaaccattggtctatgagatccccaaaaggagttgctgtggtttgaacatcctccagaagttcatgtgttgaaagcatgctgcagtgcagagaggtgggtccatgtttgccatcctttatcctccccagccacagcctctacaaaagcaactagaagaagacggcagcagagggcgcttcttcaaacaccctgtccaactcctggcactgacaagtactgagtgaactcaaaccctctgtaaagtaacagaagttagaaggggaaatgtcgcctctctgaagattacccaaagaaaaagtgatttgtcattgctttatagactgtaagaagagaacatctcagaagtggagtcaaagaaagttgacagacaatccgtaggcatcaacgtccgcaacggcaacca

SEQ ID NO: 36 - DNA, 515 bp, synthetic construct
  source 1..515: mol_type = other DNA
tcagactggctggcagaaaaaaataaagtcacatctggaaacagctgcactagcaattaaatagcatttaatgtgactaatatcaaaagggtgggttattttccccctagcattaaggatgcaaaatttcagcttccaagctactctattattttttgagtcagtgggtgtttagaagtcattctgatatttataaagaaaaacccccagtgagtcatagaaggggattttcctggctgtcggttcttggaaaggttcattaatgaaaacccccaagcctgaccacctagggaaaaggctcaccgttcccatgtgtggctgataagggccaggagattccacagttcaggtagttcccccgcctccctggcattttgtggtcaccattaatcatttcctctgtgtatttaagagctcttttgccagtgagcccagtacacagagagaaaggctaaagttctctgaaagaaagttgacagacaatccgtaggctgcaacggcaccgacttctacta

SEQ ID NO: 37 - DNA, 515 bp, synthetic construct
  source 1..515: mol_type = other DNA
gcctgcgcatcttccctgagctcattcctgtgtgcataaagtggggctgaagtaatgagggttgggggtgttttttctagaaaacagactagaagttatatctaaatgcgtgagtcagctccatgagtcagttcctcaagagatactggttgacaccaggaccggttccagccctgggagccccacccttggcgtgtgacgatacatgacatggaggtgtgatggctttatcctgcaacccaacgtctcatcttcccatagtaaagatgacggcgccttgaggtaagctacaggcaacaccacttccgcgtttctcttgcgccctggtccaagatggcggatgaagccacgcgacgtgttgtgtctgagatcccggtgctgaagactaacgccggaccccgagatcgtgagttgtgggtgcagcgactgaaggaggaatatcagtcccttatccgggttagttgaaagaaagttgacagacaatccgtaggcctacatcggcaacagctgcatca

SEQ ID NO: 38 - DNA, 515 bp, synthetic construct
  source 1..515: mol_type = other DNA
ttattaaaatcaagaacagaaaggccctggttgtgggggcagctgccgtgcaccagtagcagcaaggaggcagtcacatggtggtttggagctcaggcttcccagccgcactgctgtggtttcaacctgactctgccatttggcagctgtgtgacctggaacatgttacttaacctctctttgtttctgtttccttatgtccaaaatgggaatgataacaatggttctactccttacacaccaccctcacaaaccaactaaacacactgttacaactcgtctaacaaacagcatttcagaaatatatgtttttctctacaatgtttcagcaaaatacagcttcatatagtctctcacgctcaacctgtcaaaaccgaatccacactgtcacacccagtcccaagctccctgacgtctgcatcctcagactccgtaacacagaagtaaccagactgccatggtagaaagaaagttgacagacaatccgtaggccgtcagcgtccacgactgcttcg

SEQ ID NO: 39 - DNA, 515 bp, synthetic construct
  source 1..515: mol_type = other DNA
tgagagagaggttagcacccatagttcttccgcgagaagggggcggggattgaaacttgattgatggcatttccgaccagtgagaacgtctgagtcaggggcccttgagtagtatgtgtcttttggcagtagagggttggtccttactttgactgaccctcttatcatccaataaacatgcctacttgcgttgggggcggggcgactgagtgcagaaaagacgggatctttcctgggcgggccctcttctgccgcactgctggtgggaggggaaattggggacccgagttggtggatgacgtagccctcacgtgaccaagagctgacgtgtgcagaagtccttcttgtcctggtcgttgttcccgtctgagtaccagctccccactgccctgagggcgggccggcctgcggcggagggaaaaaggaagaggagaaggaaattgtcccgaatccctgcaggtcagaaagaaagttgacagacaatccgtaggctcgccggcttctgctaccgcgac

SEQ ID NO: 40 - DNA, 515 bp, synthetic construct
  source 1..515: mol_type = other DNA
tctgtgaatgacaaatgataagtgcagttgtgattagggctatccatgcctttgaggaatcgtttttatgcctgtctctctgaagagaataatcatttgatgaagaaaagactgagtcataccctagagtcagaactatattctttttccaacttttttgcatgtgtgtgcatgcatgggcacacacacacccctaaagaatttctgactcactgtaaattggtattgaatcctgctcggcgccccttacgccactggctcagcctcagagacttcgcgaatatggctttgcgcactgcggcggggctgcgccgcaaccgagctcagccctgtggctcctcctcgctgccctgcgcggattggtggcagacggcaaccgggccgctgattgggcggcgaaggagccattcggggagactctggtgggttcggctgccccaagagtgataagttcggcttcagacaaagaaagttgacagacaatccgtaggccggctgcgtcatctacttcatcc

SEQ ID NO: 41 - DNA, 515 bp, synthetic construct
  source 1..515: mol_type = other DNA
aaacgtttgccaacccctggcttgcagaattactaagagctgaagaaactgaacctaggcttagcttccaggaataattcttaaagtcttacagcagaattgagcttctaagaaagtggctgcccctactataatcaggaagatgtagaaacaggaagttgcctaagagaggaggaagccaccactgcctgtgctggctccagaatgtactctacctttgctatgattcatcctagcagacagtgtcagtgttgatgactaacggttgagtagcatatacagtgtggatactctggacaaagggatgattcattgtcctgggtgagatggtgtgagatttcatcaggctactcagaatggtaaacaatttgaaactttatttctgaaattttccatttaatatttttgaactgtggttgactgtgggtaactgaaaccaaggaaagtgaaactggggataagcaaaagaaagttgacagacaatccgtaggcctcttctactgcacccacaacat

SEQ ID NO: 42 - DNA, 515 bp, synthetic construct
  source 1..515: mol_type = other DNA
ttatttacattcatgacaacagaaccgaagccacaacatagggtctattgttcacctcataggggtgaccgaatctatttatccatgtggtttgggagctcaccactgtgcattgaagggcctcctgttggcaacatcaccaagagcatttcagtcactgttactacaatctgaacaatttgggttccacgctgtggttttgtaatttctatttttaaaacttgaaccattcctaaattattttaaagatcaaagaaaactttcgtcatactccgtatttgataaggaacaaataggaagtgtgatgactcaggtttgccctgaggggatgggccatcagttgcaaatcgtggaatttcctctgacataatgaaaagatgagggtgcataagttctctagtagggtgatgatataaaaagccaccggagcactccataaggcacaaactttcagagacagcagaaaagaaagttgacagacaatccgtaggccaacatcacctactaccccgact

SEQ ID NO: 43 - DNA, 515 bp, synthetic construct
  source 1..515: mol_type = other DNA
gtatgatgattcatacagatactgctttatgtgagaggataggccagaatggaaccaaatttctaacttttctatgaattggagttactaatacctgtctcttggatgtgaccattaaatgagggatcaaagtaaactcactttttgtaaagtaagttcagtgcagatactgtcttctgtagagcaaatataaaaagaagttgcttctcatttcaggaggagaacaatcatcctctctaccaatcagcaggatgtgggtggggccagataagagaataaaagcaggctgcccgagccagcattggcaacccgctcgggtccccttccacactgtggaagctttgttctttcgctcttgctactgctagctctttgggtccacgctgcttttatgagctgtaacactcaccgcgaagatctgcagcttcactcctgagcccagcgagaccacgagcccaccgggaaaagaaagttgacagacaatccgtaggcgtccacgtcgtcgccgcctgcgg

SEQ ID NO: 44 - DNA, 515 bp, synthetic construct
  source 1..515: mol_type = other DNA
tgcagcactgtgtattcatgatcttttcagatttgcttattggtgcagaaaggggaaagagtctaaagtttcttgaatctttgccagacactgtactatgcctctgaatgcatcatgccttaatcacgcctcacagcaactattgctactttcatctttcagacaaggaaacaggttcagaaaggctaaccaagttgtgacaggcacctagcctgaatcagtggatttcttcctagtctagggcccccggggcgtatgacgccggagccctctgaccgcacctctgaccacaacaaacccctactccacccgtcttgtttgtcccacccttggtgacgcagagccccagcccagaccccgcccaaagcactcatttaactggtattgcggagccacgaggcttctgcttactgcaactcgctccggccgctgggcgtagctgcgactcggcggagtcccggcggaaagaaagttgacagacaatccgtaggcgcaccgacaacgccgacatcttc

SEQ ID NO: 45 - DNA, 515 bp, synthetic construct
  source 1..515: mol_type = other DNA
ggaataaaagctggccacctgagccagccccagcagccgctcggctccacttccatgccatggaatctttgttttttcactctttgcaatgaatcttgctgctgctcactctttagtgagcactacctttatgagctgtaacactcaccacgaaggtctgcggcttcactcctgaagtcagcaagaccacgaacccaccaggaagaagaaacaaccctgtacgtgccatctccttgggtcctgtcttctccaccttctacgtttcaaccggaaatagtcgtacccatttaaagccacgtcggtactggcctcggtcccgccccccacactgcggaaccgtttccggggtcagggcattccgtcccgccccgccgccggtgcagtgttggaagctccggttctcccggaagtggcccaggtctctctgtcggggtcccctccatctcgctgctgctgaaggccgcaaagaaagttgacagacaatccgtaggctcatcttctactacgacatcatc

SEQ ID NO: 46 - DNA, 515 bp, synthetic construct
  source 1..515: mol_type = other DNA
gcaaaacaaggtcaggttgatgttctcagggttgagtcaaatccacccattttccactaggtggcagaccttgttaaaaagttacggaaaaggaaagaaagacaaagaaaataatgagtcttctgaagctgaccaatagatgtctctttgcaaccacatatccctgagctgtcgcttaaaatacacacaaattcaacactccctagtctttctttttcattttacagatatcctgattgcgggagcgccacgcaccgcccacctagctccgtccaccgtccagctcgctccgcccagctcgctccgcccccttccccgaaagcccctccgcagagccgcgtgcacgtgcgtggcggataccgccccctctgctctcttggccaatgagaaaaagctacgtaactctccaccgcccggtggcgggtcacgtgactgcgtctccccgccctctcaccccgctgcctaaagaaagttgacagacaatccgtaggcaacttcatccacgcccacttctt

SEQ ID NO: 47 - DNA, 515 bp, synthetic construct
  source 1..515: mol_type = other DNA
gcaaattcctggaactgcttttactgttttctgtgactcttattaggaaccacactcatgagtcatacaaccagtaaggcttaccaaatatttaccatgagcagaatcctaagccaggtcccgagagggcgcacataaagtcaaaactgaaaggaagtccccaaagttatctgatccagcttcctgctttcaggtaggtgaatgtcaataaagtgagctagttgttagaatcctcgcttgtggttctccactcctgattggtcaggttgccccgccatcacgcctccctctgctttcaaggttgagaaggaagcaggggtaggggggtggggccaagtggcgcgtgcgcgatactgttgctgcccctttgctgctattgcgttgcaaaaaaaatcctgactaggtagccttggaccttttctgtgctagcgagtctaaaggaaagaaagatttctgcaactgaaaaagaaagttgacagacaatccgtaggccctcatctccttcttcaacatct

SEQ ID NO: 48 - DNA, 515 bp, synthetic construct
  source 1..515: mol_type = other DNA
gaactcagttgctgccacacctcatggtctgaggaagccggcccttctactcagagacagtgcctgagaggagactgctgaagcctcagctcagcagtatgtgagcttgtctgcctctgcaaactgtcactttatccagcatctgtaggtttgcattgccagatacccacatcaaagcctaacctctacaggtggctaatggaacacagcaaagaaaaaaaccactaaggtcctgggcctctgcctcacccccacgctgcctcagctggggcagcaggcccaggcctcttgcataagcgccctgtgggggacgaggctgcagctgtgcctggccaccccatcccccagcatcacgagtgttcagtgggctgtccccgggccctgggtggaggccaagcctggcccataaataggggtctcctcagtgccctccgctcctcctgcacacctccctcgctctcccaaaagaaagttgacagacaatccgtaggccctcatcgccagccccaacgact

SEQ ID NO: 49 - DNA, 515 bp, synthetic construct
  source 1..515: mol_type = other DNA
agaaaatatatggatgatatgttctttgctgtcaacacttaattaaaagaataaattttgcgtttgttggctctggttgctcataattgacttctctctggtacagactgacatcattgaccacagctttgcagtggaatggatgcaggattttgaggctttccaagatgccttgaatcaagagactacatacgtcagtaacctgactcgttcaatgagcctggtgttagtcctgcttcaggcctgctggcctcccagcactgcctgcccctccctgtcgggggacatcgcctccacaccggctggggaaggagcccaggggtggggctggtgggtggggctggtggttggggcagccagagaagtaagagggaagtgagaagccgggtggggcaggctggaaggaagacgaacctacgaagcagaggtaggaggaagaaaggaaagtaggagtgttgaaaggtaaagaaagttgacagacaatccgtaggccgcctgctgccacaccggcggca

SEQ ID NO: 50 - DNA, 515 bp, synthetic construct
  source 1..515: mol_type = other DNA
catgttataaatcattgtggaaggctgaacaaaacaagtgtggatccttgggcaggaaatccactaagaataacaaacctgaaagttgactatcactagtggagatgacatcaacattgactttggttgctattaataaacacactaaaaatgcaataggtttaatgactgtaaatgctgtctcccatctcagcacaaactgctgtgtctgggaataaatgagtatttattcctcgggagttgtagtctctagcgactggccccgccccgtgtgcagctttcgcggcctgcgtctggagaaaaccctagcgggtggctccgtgcggccagagctctagagagtggtgccgccttccaaccttcttccccaagccctggtggccggctccgcctcttctcgaatcttttccacagcccaaaatggccgcagaggtgtattttggcgatctagagctcttcgagccaaagaaagttgacagacaatccgtaggcaacggccactgcttcctcccctc

SEQ ID NO: 51 - DNA, 515 bp, synthetic construct
  source 1..515: mol_type = other DNA
tcatgcaagtatttaagtctactggaaaggtgtgagcatcatttaccttaccatttttttccattagtacagagcataaaaaactagttatataaagttgtttctgtgaatcagtagttgctttgctgttttcttcctccaggtggggctcttgttgtttatcagactagtttttgttttgacaatagctttaaaaaaattagaagagttacctaagtttcttttttttttcctacccaagtccctgcgtggtaggaatttagaccctgaggaaactccattgtgtgtttctaagctgcttagctgtcagtgatgcagctttgctttcagagtaacagaggaactcccagctgtgtgggtgatgggctttgtgatgtaacagagagcgcgttcctgcaagcagccttgaggctgggaggggtccacctaagccttatgctcctttcccctgaggttctacagataaagaaagttgacagacaatccgtaggcaacatcaacatcgccatcgactt

SEQ ID NO: 52 - DNA, 515 bp, synthetic construct
  source 1..515: mol_type = other DNA
gacagggtttcaccgtgttagccaggatagtctcgatctcctggcctcatgatccacccacctcggcctcctaaagtgctggggttacaggcgtgagccacaatgactggcctagaattttctacatacataatgaagtaatctctaaataatgactcatttcttcctattcaatctttttgtctcattgcattgactaaaacctcaagttcaatattagctaactcatttcctcacttccgctcccggggggcgaggttgctgcagtgcattcggtggtagtttggtgtcagtcctgtgtcttgtcggtccttctaaacgtgtccccttacgatgctggctcgcaaccacctggaagttgactaaggggagaaggagtctcgttggaaaacggaggtttggagggacaacggcctctcttttcgttcttgtcagcggagccttcttggtcttggggctgtcctaaagaaagttgacagacaatccgtaggcgccgcctcggccgcagcatcggc

SEQ ID NO: 53 - DNA, 515 bp, synthetic construct
  source 1..515: mol_type = other DNA
ttgtgccccatgtatgtatgtgtgcatttagttctatacaactttatcacgtgttaagatgtgtcaaaatacagaaccattctgtcaccacaaagatccttcctgttgccttttataaccacacctcccttgctccctctacttcctcatctctaaccccaggaaccactaatctgttctttgtctctataatttgtcatttcaagaatgttatgtaaatgaaataatattcctgtggggagaaaggaggcccttgggcactgtctgaaaagtgcgatgccaaatgatctttagggacagacagtaaattatatcccttgctaaaatacctctcggtagcgaaccaccaaacgtttcttttttaagccccgcctctcagccgttacgcctagttcggctgtctctgattcaggaagctggcagttcccacttactcctccccagcaagagctaacagccctcctaaagaaagttgacagacaatccgtaggccccccaacagcagccacatccgc

SEQ ID NO: 54 - DNA, 515 bp, synthetic construct
  source 1..515: mol_type = other DNA
caaatcatggtccaaatggccaggaacctggggacacatagtgtgttctggcagaggagaaattctaggtagccaggatacagaggccaccttgtgactcaccagtgtgtcagagtaagtaagtcacttcattacctaaaccctcagtttcctcacttgcagaatgaatgattagagctttctcttgaggttgttgggaggtccagattagataatgtctgtgaaagaattccttcattggtccctggctaattcaccaatttacaaacagcaggaaatagaaacttaagagaaatacacacttctgagaaactgaaacgacaggggaaaggaggtctcactgagcaccgtcccagcatccggacaccacagcggcccttcgctccacgcagaaaaccacacttctcaaaccttcactcaacacttccttccccaaagccagaagatgcacaaggaggaacatgaaagaaagttgacagacaatccgtaggcatcggcgtcaacggcagcttctt

SEQ ID NO: 55 - DNA, 515 bp, synthetic construct
  source 1..515: mol_type = other DNA
ctcggggtgtctgcccaatggatttgtcacagaatcagaggcccagtgagtgaccaaggcttgcctgagcaggatatgaaagccgcgctgctagaatctaagctggaccgcagcataggccacgcgctttccatcctacctgccctgtaacgtgactgacgttagctgcggtggggcgaggagcgccgtcttgtgtcctgagtttgatcacctcgtcagaccacaagttgtccttctgtcattcccttgataaaagaacttgagctgcgcaaaagtaaccaatcttcaccaatctcatcttcacatataaacagccgcctttcaagaagcaagctgccagaaaaatgatgcacgatgctctctaaactgggtcattctccacttggagggctcagggcacggttgactttccccgtctgtctcctataccacaggctctgggcatcaccagcggccccagggaaaaagaaagttgacagacaatccgtaggcgtcgtcaaccgcgcccgctgcgg

SEQ ID NO: 56 - DNA, 515 bp, synthetic construct
  source 1..515: mol_type = other DNA
ggccaaggtctcttgggcaaactgccagcaggtccctgtgggaggcaattatgatgtcatgtctttcctgctgtaaccacatactctcagactccagatagtcctaaggcagctgtgacaagcatctgtattagcttactagtgaggcagggttcatgggtccaaaaaacttggcacatcagtgcttctgggcagcaaaatggattgggggaggggtgaggcaaaggtgttcctccctccgtcttcacccgccctgggctgcagaggaacagggagtggttttggtggttggcacaggggtagatgttgatggcacgaggccctatcatctgacagctgcctgacccacggtggggagggccctggagggagtgctgcgggagcaggaggggcagttcctataggcagcctgactcccatggtgagcccactgccaccaccacattgccctggggcagccctgcaaagaaagttgacagacaatccgtaggccgcttctaccgcagctaccacct

SEQ ID NO: 57 - DNA, 515 bp, synthetic construct
  source 1..515: mol_type = other DNA
aagtcaaattatcaaaaaaaggaactgagctggtgatgtgcactaacacagcaaatcacaggaaaggggaaccccaggtaaattacagccttctgacctaggaagacgtgtggtttgcgtctctgagttacagaaacacaggaaatgcttactggaccagtcaatttcagaattttgggtcccaagctaggctgactcaccttcagaatggaaaccacgtgacagccctttccttggtcccgctactggacccatttcctacctgggaaatggagtcgaagctgactcaaaacgtaacggcccaattgtccttgagacttcattccccagcaagctcagcgtgtaacgtgcgctatggagccgaaagtcgcagagctgaagcagaagatcgaggacacgctatgtccttttggcttcgaggtttaccccttccaggttagtttatccctcctgctgttctagggaaagaaagttgacagacaatccgtaggcggccgcgccagcgccaactgcgg

SEQ ID NO: 58 - DNA, 515 bp, synthetic construct
  source 1..515: mol_type = other DNA
tttaccaagggtagtggaagtggggcccacattgtgagaaatacaaccataagtaaaaagtgctaaatggcctctctttaaccagagaccacagtctgtaacttcccctgctttcagtggttacctctgggtttcccctgttgtgatttatagaaaatgactatcactttggaattgagctggtggatttctacaaagattcttggtatttcatggttattttctgatgttcctagcagcccagctcgggacgcgggggtgagcacgactggctggcccagttctgcgccaacgccgccgcagcgtgcgcgcaccgcagccggggctcacgggagcccctgcctgtctactgcacccggggcggcgggggaggggagaggtcattaaaaaataacctcaggaacgaggcggggaagagtgaagagccgcggacagttggacaggctctttctctaagagtgggtaaagaaagttgacagacaatccgtaggcgacccccgcaacgtcttctgcca

SEQ ID NO: 59 - DNA, 515 bp, synthetic construct
  source 1..515: mol_type = other DNA
gacaaagtctctttcccctggaacttaacattttcagtgacacagctcagaagcacctaaatgaatgtatagtatcgttttaagtacttaccagtggtgtgaagaaaaacaaattaggggaaaggggttgaaagccttgggtacacgagtgctattttaggtaggctggtctggaaagaactttttgaggtgacattttagtagaaacctgaattatgttcttatttaattcctgaagcttctaaaaagccactgggaaagtactaaatctctgagactaaagagggcggactcagcctcacttcctccttcttctcatctgggcttcctgtcgtcacagcatgatcatattttttcacccttcacttctccttttacacaaatagccccggatatctgtgttaccagccttgtctcggccacctcaaggataatcactaaattctgccgaaaggactgaggaaaaagaaagttgacagacaatccgtaggccaacatccaccccaccaacggct

SEQ ID NO: 60 - DNA, 515 bp, synthetic construct
  source 1..515: mol_type = other DNA
attacacctagggaagatttacttcttatcctctgcatcccacgtcacccccaccccccccagctgagctgcaccccacgctcccagcagccctcacgctgaggaataagcagctcagctgcctctcccgcatcctgccgagctgcagccaagaccagagggactttccccacccccaccacacatgtgtgtctatccacagaggaacatctatcaggggctcctggagatcctagaccctgctataccctggtctgtcagtcaaccaggcatccatccctgaccctgcaggagcgtccctccccccaccttggtcacatggctggccgccactgagcctcagaagtcaatctccaatgccccaaatactgttcagcctggaaaccacagagagcccttcttgccacccaacaggaacagagcaagtggttctggcctccctgggatttggatcctggtttccaaaagaaagttgacagacaatccgtaggcgcgacggccactgcgtctactac

SEQ ID NO: 61 - DNA, 515 bp, synthetic construct
  source 1..515: mol_type = other DNA
tcagttatgtccaatctgaacagctgagtgtttacaggacatcacgtgccatcttatggtttaatatttacaaatgcctagttttaaggtaacaaagcagctgattgtatctacaacatgctattctatgacaccacatcaaaagctttaaaaagaaagctcatctctattttcttagtagcatctaacagatatccaaataccaagaatcttaacttgtgaatggtggttccttagtgtcaaaacagccggaaatcaagtccgtttatctcaaactttagcattttgggaataaatgatatttgctatgctggttaaattagattttagttaaatttcctgctgaagctctagtacgataagcaacttgacctaagtgtaaagttgagacttccttcaggtttatatagcttgtgcgccgcttgggtacctcggatgtgagggcgatctggctgcgacatctgaaagaaagttgacagacaatccgtaggcactgcggcagcgtcagcggcgac

SEQ ID NO: 62 - DNA, 515 bp, synthetic construct
  source 1..515: mol_type = other DNA
aggtcagggtttctgtttcctgctgctgggattccaagtactgtatgtgctttaaaactttgcttccgctcatttaaagtgagactcttttatttaccctaaaaggaacttgattgactgttccaggtttcagaaatatgaactctctagatgaatgttgcctgttaaagttttcagcttcactctgatacctctgggcactcgtataagctctcacagaaaagcttaaatcctggtacctgctggagaggtggtgggtggctggaagcggctggctaggaggcggggcgtggggcggtggaactcctgggctgcggcattcacgtgatctgcacgggcgcagatgtaggcaccggtccgagtgcctgccctctgtccccgcggctgggtctcgtctgctccggttcctgggctcctaattcttggtccagcttcttccaggtcagtgtgcgggccttccacgcaaagaaagttgacagacaatccgtaggcgcctacgacggcctcggctactt

SEQ ID NO: 63 - DNA, 515 bp, synthetic construct
  source 1..515: mol_type = other DNA
ccatgtatctatcatccctgtcccagtgatgattaatatatagccaattctgctccatctctactcccacctcttccccttcctgttattattatttgttattcaagacagtgtctcactctgtctccaaggctagagtgcagtgacgcaatcacagctcaccgcagcctcaatctccctgggcttaggtgatcctcttaactcagctggaaccacaggcgcacaccatctcctaactgccgtttcaatattcatattgatcacaggagctcctgcctgcctggatgaagaggaggtcaagactttgtcccccactccgcaagataccctctctgttccggagcggtgggtccctcccctgttaggaccttgtctccctcaggactggacctggatcctgggcctgcagtcagattgccagtttcacttagaggtggaaatgtcaacccactggttggaatgggaaagaaagttgacagacaatccgtaggcccggcaacttcagcgccttcaac

SEQ ID NO: 64 - DNA, 515 bp, synthetic construct
  source 1..515: mol_type = other DNA
tttcttcttggtttttgttttgttttgttttgagacaagttctcactctgtcactcaggctggagtatagtggtgcaatcgcggctcactgcagcctcaacctcccaggcacaggtaatcctcccacctcagcttcctgaatagctgaaaccacaggtgtgtgccaccacaccctgctaatgtttaaattatctgtagagacggagcctcactatgttgcccaggctgcttcctccagcccaacggaagaatgcgaggagcgcgcccgcgtcagggccccgcgcttctcagctgggcggagtagccgttctcggtgcgtgagcctgctggcatcggtcctgcagactgatttcccgcttgtggccttgattgaagaatcccatctcttctcacatcttaaaacgaaaaaagactgggagaaagagccagcgtaaacagggcgacgtactgggacggccccggcgaaagaaagttgacagacaatccgtaggctacgacagcttccactgcagctt

SEQ ID NO: 65 - DNA, 515 bp, synthetic construct
  source 1..515: mol_type = other DNA
ggaagtcctggccagagcactcaaagagaaagaaataaagggcatccaaattggtaaagaggaagtcaaactgttgctgtttgctgatgatatgatcatatacctagaaaaccctaaggattcatcttgaaagctcctagaactggtaaacaaattcagcaaagtttcaggatacaaaattaatgtacacaaatcagtagctctgctatacaccaacatcaaccaatagctccttctggaggtagggcggggccagaacagcggcgggggcggagttccggctgggggcggggcggggcggagcgggagctgcgggattccggcttcaggggcggggcaccggcctctgggcggagatctgctgccgcgttctacccttccggcccgtgttctatccgccgcctccaccttccatccggcgccggctttcggcgcgacggtcgccgcgttccatcgtcgcgcggaaagaaagttgacagacaatccgtaggcctgcttccacaccgtcaactact

SEQ ID NO: 66 - DNA, 515 bp, synthetic construct
  source 1..515: mol_type = other DNA
gtgcacaggctaaatatcttcccacagtgactcaaaaaatctcacagtcagaagggctctaaaggccttgactcaacctccacccactataggaatctcccacagatggtttccaatttctgttcgaataccaccagtgatggagaatccaccacatcacaaggcaatcccccacacagttggaaagttcctccactttgaactgagggcttctgagtagcttccacttctcctggttgggcaagagaagagccgcgcccaccacggaacatctctgcgcatgcgccgggggccagcttctggtacttttgacgcgtctgctaacgtagtccctcagtgcgcatccggacgtaggaggtggaggttgtggaattcgccgttcgaaagcagggactaaaagccccacttcgtcttacgttccgaaaggaaggcgtctgttgagcctttctctcagtcgtgagggaaaagaaagttgacagacaatccgtaggccagcaccggcggcgacgtccgcg

SEQ ID NO: 67 - DNA, 515 bp, synthetic construct
  source 1..515: mol_type = other DNA
cccaactttgtgctataaacaacactattcaaaaactcaacacattcaacaaaatagaccatatcctgaaaggtcaacacgttgcttcctggaaaaataagattgctttagatctctgctcagtgactccaggttatcttattatgaccaaatccaaaacagcccatgggcagaccgttaccaaatatagaattagcagttagaaaccagaaacaggaactggaagatgctcctcatacacacaccccaaaccctcaaacctccagggcttcctgcctgtgaaccgaaagggggagtgcgaatttcttggccctgtcggcaggtgctttctcaaaggccccacagtcctccacttcctggggaggtagctgcagaataaaaccagcagagactccttttctcctaaccgtcccggccaccgctgcctcagcctctgcctcccagcctctttctgagggaaaggaaaagaaagttgacagacaatccgtaggcgccccaacgtccactaccacaac

SEQ ID NO: 68 - DNA, 515 bp, synthetic construct
  source 1..515: mol_type = other DNA
ttaagtagaaggaatcatatccagaacctggacaggtcagctcatttaagcatccttgccccatgaaaagagggagccctttcattatgacctttactctctttccagaacctctctctgagttataactcatgtttatgactcagtctgagacttctttttataatttcctctgtttctcttcccttcttctgctccccaccacccccgcccgctgtgggctgagttgatccttagcctgagaatagttagcaaacaagggaggttgtcatttcctcatcgtcaagctttgttcctcgtgggggctagaaatctctttccagttccagattgtgaagggttcctgagtaagcagcgtgtctccatccccctctctaggggctcttggatggaccttgcactctagaagggacaatggacttctggctttggccactttacttcctgccaggtaagtaccgtggaaagaaagttgacagacaatccgtaggcttctgcggctgcggccgccacag

SEQ ID NO: 69 - DNA, 515 bp, synthetic construct
  source 1..515: mol_type = other DNA
gagccactgcactcaaccagtatatggagatcccccccagcactttgaatatgtcattctcctgctttccgtcctctgtggtttgagatgagaagccagccattgattgtattgatactcccatgcgtgtgatgagtcacttttctcttgctgctttcaagatgttctctgttttttggctttcagcagtttaaatatgatgtgtctgggtgtggacctttttgtatttgtcctgccccagaggctgagaccgacacgccctccccgaagggcagacccgccttgaggaaggcggatccgggtagggaccgccgcctggccctcacccgacccccgagaaagcaacccagcgcgccgcccgctcctcacgtgtccctcccggccccggggccacctcacgttctgcttccgtctgacccctccgacttccggtaaagagtccctatccgcacctccgctcccacaaagaaagttgacagacaatccgtaggcctgcgaccgcgtcgccagccgca

SEQ ID NO: 70 - DNA, 515 bp, synthetic construct
  source 1..515: mol_type = other DNA
gctgcaatctgattacttattgacaaggaacttgaaactgaagatgtaatcttaccaatcattgaaaacaattttgagaaaagaatgtttcaaggaagtaatcagccacaatctcatggtgacaatctagtggagtaactatgtcataatattagctggtatagcaacagtaagtgcctaaccacattcagcatacaagaaatatctcttcagtgtcgctacaccactggtcctgggcgggccctcttctgccgcactgctggtgggaggggaaattggggacccgagttggtggatgacgtagccctcacgtgaccaagagctgacgtgtgcagaagtccttcttgtcctggtcgttgttcccgtctgagtaccagctccccactgccctgagggcgggccggcctgcggcggagggaaaaaggaagaggagaaggaaattgtcccgaatccctgcaggtcagaaagaaagttgacagacaatccgtaggcctgctgcttcaacctccgcgccc

SEQ ID NO: 71 - DNA, 515 bp, synthetic construct
  source 1..515: mol_type = other DNA
tgacccagttcacaataaactggttgccatcttgcctcatgtagcatttcctctgctttcttcatcaccatcttgggtttcactttgcctcttttctgtgttggatcctctgttttctgaaacctatgacatgcatttttttctgtttacttttttgttttgctaacccacatcctccagtggctttctgagaaaaaagtacatggggcatatgtttctcgagagcatactcctggttgcctacaaagggcaatgttccagtgtgttttctcttcgagtgtgcttcagccgcacagtacttcctgtttattcaaacatcttttttaccactcggcaacccccgcttcgcagaaacagccagaacccatctacagcaagaagacggaaatccaaaggcagacagtacgggctcccttcgccaaactcttcattttctctgtaagtgtccagagaaaaagaaacataaagaaagttgacagacaatccgtaggccggcaacgtcgacggcctcgtcg

SEQ ID NO: 72 - DNA, 515 bp, synthetic construct
  source 1..515: mol_type = other DNA
tcgcttcacagtggagaactctcataaacactgacttgcctaggtgaccaaggttaacatcaccagtgatgagtcatgttgatagcaagtaacctctgataaaatgagatgagaagcacacttcaactctgtggccttcttctccaaaacacctagccacatttgaatgagaaaaccaccagacaaaaccaaattgagcaacattctacaaaatacatgaaagctactcctcctctgatttaaaggtgagcgcagaccatccccccggcaagcccagcccgcgacttagctctcgccaccccacgcagaagtgctttaacaggataaaagtgaggggggaagccaggcaaaggtcagagaggatgagcggatgctttgctggcaccccaggggggacgtcaggtaccatttatgcctctgtctttcagctccgtgtcaggtctctgtgtttgttccccattattaaagaaagttgacagacaatccgtaggccaacgtctccttcagcagcgtca

SEQ ID NO: 73 - DNA, 515 bp, synthetic construct
  source 1..515: mol_type = other DNA
ctttaaaccacagaatatgcaaaatggttctaagattatatgtccctactactaccaaccacagatctaagtaaagttcagagtagctttgtagttcctgttattcttagaatacactctactaagggtgtacagtaagagtactatgtttaaaagatacctcaattagttacttttccctctgatcatattgtcaacatgatgtacatttagaggagatagcatgtttttccttttgctcatgaccttttctctcgccacaccctggggctcttgggaggagctgagatctgcgctgcagtgccaggatgctgactctgttggtgctggcttctgctgccttcctgggtcccgtcacatccttcttgctcaaccactgggtgcacaggatggaaacttctattccctctctggaagacagcgcgtggcttggcttcacagagttgtggctggagaccgaagcaaaagaaagttgacagacaatccgtaggcagctccagcctccccctctaccc

SEQ ID NO: 74 - DNA, 515 bp, synthetic construct
  source 1..515: mol_type = other DNA
tagtctgttctcacattgctactaaagacttacctgagactgcgtaatttctaaatggaagaggttaaattgactcacagtttcacatggctgggcaggcctcacaatcatggctgaaggcaaaggggaagcaaaggcatgtcttacgtggtggcagacaagagagagtaggagccaagtgaaaggggtttccccttgataaaaccatcagagctcatggacttattcgctcctctaaacagaccacgtttttctccgctcttccccttcccactccctgaaatctagactaaaactcttttaagataactgcgaggtataaagaacgtctagagcctaagcggcccgttgccagattctactcctcaggcctcaaatgtgagcgccccaaacattctagagctgaacctggtacgctcgcccaccaaactgccgtgctcggggcttagtatctcacgcgcggcaaagaaagttgacagacaatccgtaggcctgcagctacgccagcagcggcg

SEQ ID NO: 75 - DNA, 515 bp, synthetic construct
  source 1..515: mol_type = other DNA
agccagaagggagaaggatcacatccccctccgtggccaggctctgagagacagaaatccagtgaaggacagagcatggggctgagtgtctgtagcccactgcattgagggcaggagagctcagggcaggtctgagtcatcaccattttctgtgtgtttcttcctaataagtgaaataatgtgtagtgtctagcacggtgcctgacagctcacagaaaatccccaacttctcctttcttctgtcccatgcctctccgtccccgaggggggccgggcctccttgtgacgccctcgcgccgtcctcgcagagtacgtggccgagcactgggcagaggacaccttctttgggtaccagtacctcaacggcgtcaaccccggcctgatccgccgctgcacgcggatcccagacaagttccccgtcacagacgacatggtggctccgttcctgggcgagggaacgtgctaaagaaagttgacagacaatccgtaggcacatctacttcatcatcagctac

SEQ ID NO: 76 - DNA, 515 bp, synthetic construct
  source 1..515: mol_type = other DNA
gccacattcaaaacattccattcctttttaagctgagtaatattctactgtatataaagactacattttgcttgcccattcatctgctgaaggacactgggttgcttctgccacgttttggctactgtgagtaacactgctatggatatttccatacgagtacagtcatgcaccacataatgacgttttggtcaaccagggaccacatttacaatggtagtcccataagatcctcggcccacgcctgcttccgcccattggctgcccgcgtttcaagacccgcccccatattggagagcttcttccggtagccactggaaagcccgcagcgcgagccggctacgctccctggcggagctctggacgccccacctactcccagcgttcagtgcggtgccctggccgccattgtttgaatttgaaaacggtaacatcgcagtgctgctcgcgggtctggctagtcaaaagaaagttgacagacaatccgtaggctcagcaacagcatcatcgacgac

SEQ ID NO: 77 - DNA, 515 bp, synthetic construct
  source 1..515: mol_type = other DNA
cttccagactcctcaccagttattcatgtcaagtggatgacaaatttactgctcaccactttcccgctggctaatttactttaaccgctgctctttagagataccactgagtggatctataatatgtcagcagtgtatttttgactagcatctgttgacacacttgtgagccaggcatgaagttttttttcaatcttctatcagttggtcatagggaatcccctataagctcctgaagctggcccacgcatgcgctcttcaaatttttgagacagtttacccagaatgcagtgctcaaaggaaacgcgtgcgcagtgtggtcaggttgtttcgctgggtgagtaaaatgaaatcttagaggcgttgtgggctggcccagttgatgacgtcaccataccacagcttctagtgctattctgcgccggtatccgaccgccgggcgcggtggcgcgtgcctgtagtccaaagaaagttgacagacaatccgtaggcatccacctcaacttctacatcgg

SEQ ID NO: 78 - DNA, 515 bp, synthetic construct
  source 1..515: mol_type = other DNA
cacctattctggtgactcggaataggtgccatttatttatctgcaatcaggaaataaagtgacacttctgagtcacaaagttcaactcttctgagttgaactatgtgaaagttctttactaataccacacagatcttttccattctgatataggaactgtgtgcatgtcctcatctgtatatttcagtgctagaaaggtgtcagcatagcagtctctcaataaacattcttcctggttgggcaagagaagagccgcgcccaccacggaacatctctgcgcatgcgccgggggccagcttctggtacttttgacgcgtctgctaacgtagtccctcagtgcgcatccggacgtaggaggtggaggttgtggaattcgccgttcgaaagcagggactaaaagccccacttcgtcttacgttccgaaaggaaggcgtctgttgagcctttctctcagtcgtgagggaaaagaaagttgacagacaatccgtaggcacctcaactactcctgcagcgcc

SEQ ID NO: 79 - DNA, 515 bp, synthetic construct
  source 1..515: mol_type = other DNA
gtttgtacccgtcctttttgggaaggcttttcagatattcaaaaggacttgtgtgttgtgatctaagctatatttactttagggggaaccttaagcccagtgacattgtggttcttgcagactcatagagatactgctttgatggtcttagaaacagagtggcatctgcaattcaagtctgtctttcttacctcttcagtgtccctttcagtgatatatagttaaaaccatccttaggtcttgtcacccccaccttttcctgctcatcacacttgaaccacactggcttgctttctgttcttgaagttctctcagccttgaccatttccccctcagatagctacgtggctgtctggcactgatcacatgtcaccgcctctgagaggcagggcttccttgaccagcctatctaaaaatagtaactcatcacattctcaccctttctcctattatatgttattttgaaagaaagttgacagacaatccgtaggcccagcaactgcagcgcctacttc

SEQ ID NO: 80 - DNA, 515 bp, synthetic construct
  source 1..515: mol_type = other DNA
gttttgcttgattggcccctttttaggcctgcccccacagtgcctcattctatttttatgttagacactgtttctctttcgtattgccagatgccctttctactgtggctcaccaaatcctccagcaacagctgttctaccagcccactctcggctacatgcagatcgaatgtgattcataattagtaagaatacctaagtgtgtcaggagcctgaagcatgtagggagatcctgtgagtctaccttaccgtaaggtgaaatcttaaccaccttaactgctgaaacccaaccacagctgctgtgagagggcaaggggtggaggtgctcaggcccagaaatttgcattcctgcttccccgtgatgaggacccaaagaaaaaaaaacattgagccacaggtagggttgccagatttagccataacaatacagcacgcccatttaaacttgaatttcatataaacacaaagaaagttgacagacaatccgtaggccccctcgactgcgtctccgactg

SEQ ID NO: 81 - DNA, 515 bp, synthetic construct
  source 1..515: mol_type = other DNA
aatgtcacaccatgtcacaccacatcacactatgtcatgccagggatgtcacgccacatcacaccatgaaactcatcatcacactagggatgtcgtaccctgccacaccccatcctgccacatcacaccatgtcacaccgcatcacatcacaccaaggatgtggcaccctgtcacagcacgtcacacgtcacatcatgtcacaccacacctcatcacaccacagatgtcatcctgcgcctcggcttcactaagcgcagtcaggtggctgtccccgcacggttcccagctaattccccgctaccgggttgcggccggaagccgggcgccgcggctctgcttccctcggggtgagtaggggcagctcgccggaggccggcgcagagctcgggccgaccagcctggcagggccgcaccgcgcctggagcgcgagggaaccggcatggacacgccgggagtcggcctcaaagaaagttgacagacaatccgtaggctctgcagcgacttcagcgccttc

SEQ ID NO: 82 - DNA, 515 bp, synthetic construct
  source 1..515: mol_type = other DNA
gaaattcccctcttacctctgagtcatgctcacttgagagagtctcctgattggatgttgactacctgtaggagaaaagatgcaggaatgtagagtagagttggttttctcactcatttaaaatgttaagtcatgtcattgctctgctcaaaatgcctccccattttactcagcatgaaaaccaaagtccttgaaatggcctgtgtagcctctgtatgctctagcatctctcctctccctgcgccgctccagagcgcaacaaccattttcccagccaggagcacaccgtgtccacgcgccacagcgatctcactgattggtcgggctcctggtaaacaaggaccgggcagccaatgggagggatgtgcacgagggcagcacgagcctccgggccagcgctcgcgtggctcttctggcccgggctactatatagagacgtttccgcctcctgcttgaaactaaccaaagaaagttgacagacaatccgtaggcctgctactcctcctgctgccacg

SEQ ID NO: 83 - DNA, 515 bp, synthetic construct
  source 1..515: mol_type = other DNA
ctggatagaattcagggagctatgaactgaaatggaaaaaacattacatcttgattttcacaaacctctaactgaaatttatcatttccttcagtatgagggtaagcaacaagccacagcaatgttaacagtgcctgtggatttatcacacagaaaccacagatactttaaacaattgtttatgttattatttattagagatgaggttttgctctgtcactcaggctggatcctgtaacacaccttctttcccctccggctttccttccccttctctcccgccttctccttattcataccagaagcgcctcagctctgattggctggagctctgtgctatctcagccaatcacaagccgggctgtgctcctacaccatccgaagagcgaatcgtgcagagaccgtgtctacgattggcctctccctgacaaggatttaattttgaatttttctttatggcgtggaaagaaagttgacagacaatccgtaggccctgcggcatctcctgccacttc

SEQ ID NO: 84 - DNA, 515 bp, synthetic construct
  source 1..515: mol_type = other DNA
acctgctgatggtcaggttcacaggagcgtgttaaattcatcactgacattactcgttcatgagcacaatagattcatgtgtttcccacaaggtacatgctcatgagtaatgcagtgagtaacccttacacaggttttgcatgtttgaccccctttctgttccacgcatttttaccaccatcagttgtaacacagcctagcatattccagtttaggctgtactcatttagtccttgcaccaatcagcgctctgtaaaatgcaggaatctaaaagtagccaatcacagggaggattgaaaaaagggcactctgataggacagaaatagcaaatgggcagggacaaacaagggtgtaaaagctggccccctgccccccacccattcctgttagcccgcagcagcaacctgctcaggtcggtttccacgctatggaagccttgttctttcgcgttctttcgctcttcaaagaaagttgacagacaatccgtaggcggcgacgtcggctacggcagcta

SEQ ID NO: 85 - DNA, 515 bp, synthetic construct
  source 1..515: mol_type = other DNA
caggttcagtgtgatctggaatgcctgcgaggcccccttgctcatcgacctgcctttaatggatgggtggtctgagtttctggagatgggcaagatggagcagtctccacacttggctcttcagccccggcgccccccacagccgcctctgctttcctggagataccgcaggctcctaacctcaggccggcttgtgctgctccaccctctccctcccccacagacacaggtcctctctaccaatcagcaggatgtgggtggggccagataagagaataaaagcaggctgcccgagccagcattggcaacccgctcgggtccccttccacactgtggaagctttgttctttcgctcttgctactgctagctctttgggtccacgctgcttttatgagctgtaacactcaccgcgaagatctgcagcttcactcctgagcccagcgagaccacgagcccaccgggaaaagaaagttgacagacaatccgtaggcacccctgccacatcatccgcgtc

SEQ ID NO: 86 - DNA, 515 bp, synthetic construct
  source 1..515: mol_type = other DNA
accatcctcctccaaagttagcatcagacgccacaagtttaaggctcagccctccatgagatttcccttgcttcagacactggcagcatcttggggatcccccagccacccacacttctgactaactggctctaaattgggggattcccacaaactgtttgggtttcataatttactagaaggaactcacagaatgaaaataaacctggccaggtgtggtggctcatgcctcctcgcggccggccggcgacgctggcgacgctttcgcccctgaggtagtttggcgaccgcgaagaaggaaaaagggcgggcgggcggctgtcctctcaccgtcctcaccccgcgaggcccggcccgctcctccgtcgtggatttcgcggcgatccccccggcagctctttgcaaagctgcttgaaacttctcccaaactcggcatggatacgactgcggcggcggcgctgcctaaagaaagttgacagacaatccgtaggccggccgcagcacccgcctcctcg

SEQ ID NO: 87 - DNA, 515 bp, synthetic construct
  source 1..515: mol_type = other DNA
gttaaactgcttcttaagaagacttgcctccctgcaatgtttactgaagggaatggatttacccagacaggcctggcctttggtagaaacgctgcacagctctgcgtagaagcagttagtcatctgtacttgcagaggctgtaaaacaaatgtggtgaactgtaaaagattaaagagcctgttttcctgccagctaccagaaagtttcacatatacttattaaagttctttcctgacactgaacatgtgggtcaccggcgagacagtgtggcaatattttccctgtaatgtaccaagtcttgccaaagcagtgaacattatgacacaactttttgtcacagctggctcctaataggacagtgccagccaattcaagcccagtcctttctgtgtttattcccatctctcccaaatatttggaaactgatgtcttgactcatgggtgtattcacaaattctgttacaaagaaagttgacagacaatccgtaggccggctccgtcctcgaccccggct

SEQ ID NO: 88 - DNA, 515 bp, synthetic construct
  source 1..515: mol_type = other DNA
tccatgtgccgctaataaaatatattttgaaagaataagggtgtggttgggagtcactgttgacaaagaccagaatgtacacgagctccccccttggtctcaggtgtactacagagacctcgagatgaggatggtgtggagggtgatatgtgccaccttgtggagtactcgtgagtttttcagaagaactgaactttttctgagtgggtcaaggaagaagccaaaccatgtcctctgcgcccactaagatgcatgaaataaaaatttccgtgactcgccctttgcagtggagaactgaaacaggcacaccagggaattggagcggaggagggtaactcaaactcagagtgagagggtttgcagggggccgatttggggccaacaggcttcccagcaggcccccggcgcgggacagcggaaggcgaaacgctttcaagagaccccgctgccaacatccccacgccaaagaaagttgacagacaatccgtaggctcctacggcagcgtcgaccactt

SEQ ID NO: 89 - DNA, 515 bp, synthetic construct
  source 1..515: mol_type = other DNA
gggaatcctaggaaagtcacctcaatgtaggaagaacatattcaggcagaaaagagagcagtaccagcagctgctggaagatctaagagaagcttgacactcctggccccaaacactgcctggctacaacacgatatccagggacagataccttccatgtacagcaagctgtggagtggcaagaaagcaaagcacgtaccaaaagcaggcaggaagcagagctggctggttcctaagccaactccttactggttcaggtatgtgctcgtctctagagtaaaccaatcagagccccacttcttactcctgggatttggtaaacggaagagacctctcctgttccgggagtaggccgggaccgtggatgagtgacagttcgactttccaataggcagagccctaggacctgcccacgtctggttcaggggctagaaaagagcgtcgatgccggcggcagtgatgagaaagaaagttgacagacaatccgtaggctccctcgtccgcgccggcttcgt

SEQ ID NO: 90 - DNA, 515 bp, synthetic construct
  source 1..515: mol_type = other DNA
attaactgtaggatgaatctttgtctagcagggaactgtggattctgtggtttttgttcttaattcttttatgtgtctttgtagatcaaaggttgtcttatataggtgctattggtagcaatttactcaaatacaaagactctgtggtttgaaagagattagtgttttaaatgaaagacgaaatctttttcttagaatccttgtcttagaggcagtatgatatttccttctcctaataaaagcatcagtattgcaaagactttccatgatcctatacccacctcgaaagccccctctcaccacaggaagtgcactgaccattggaggcataaaagagatcctcaaagagcccgatcctcactctccctgcacagctcagcgggacctcagccatgagacttctcatcctggccctccttggcatctgctctctcactgcatacattgtggaaggtaagtggagaaaagaaagttgacagacaatccgtaggctgcaacggcttcatctccgcctg

SEQ ID NO: 91 - DNA, 515 bp, synthetic construct
  source 1..515: mol_type = other DNA
aagccataacagactaaatgaatattttaccaatttagtgggtagggtggggagctattctctcatgaatggataatgaccttaagtaactgtgactgctctgtatggcagcattgcaaaggtcaatgtgggaacatctttctcagaaaggaagtgtggtgggggttgtattttaattcaaccatttgtgttcttgtgtatttcacaacaaaacctaatgagaccaaatgtcctctgctccatgattgggactgaagtaaggaggtagcggcccaatgggctgtgggaacggtcctcggcgggttgaggggcggggatatgcaaatatggtttgaaaagccggcgggaaatccgagtttcgcgggaggaccttggcgcgtaaaccgtatcccttcattcattgtcagcagcagcttcctggagccatttttcagctgccggccgcagcacccgggctgccgccgaaagaaagttgacagacaatccgtaggctcatccgcaactactaccccacc

SEQ ID NO: 92 - DNA, 515 bp, synthetic construct
  source 1..515: mol_type = other DNA
gtctgttcccttatgtacaaaatgtataaaaaggacagttcatgcccctagtaggttgataccctagtggatgaaccgtgtatttagtatgaaagataaagctcagatttctagtccaatgactcattaaaaaatattgtgtggtttgatgcttgtctaaacatcaggaaaacaaatatactttttgtattactttatgaatcaaacacatcattgtttcttgttgagattcctctgtggcaggagccgggaggaagggagcgagccaagaggggtgctgcccaccggaaacgatggcgcgaggccgcagagctaaatgggggcctctccagggagtgctctgttcacggctccatcgctgttagtaagtatcttgtgatttcggaatttaaatgaggttgtgtttaacctgcataacatctggcttttaaaatctgactttattttccttttatttctgtgcaaaagaaagttgacagacaatccgtaggccatccgcagccgccactgctgcg

SEQ ID NO: 93 - DNA, 515 bp, synthetic construct
  source 1..515: mol_type = other DNA
cagttcttagtccctcacttcctagctgtgtgatggtgaggggaagttgtttagcatctgtaaacctcagttttcttattagtaaatgagatgaatcaagtttttacctcatcaagttgatatggagctttcagtatgatgcttgacacatagttagcattcattaaatgttagcaaaaatgatgatgatgactgcaatgacaacaagctgccaataattgtcttggccctcctaggacccagctacggaggcaataaaaacttggtggagtctaagtcctgggaagggaaaaaaaggacggagggggcggggcctacagacaaccccgcccatcacaaagaccccgccttccagaacgctgacgtcacaatttggccccgcccctcattgtcagtcccgcggagccagaggaggcgccggtcgctggcagctgagcggcggaacccttcgctggcgggagcgcaaagaaagttgacagacaatccgtaggcccggctacgacggcggcggcgtc

SEQ ID NO: 94 - DNA, 515 bp, synthetic construct
  source 1..515: mol_type = other DNA
gtgtacaatacactggttggtatctgttctcagcacaaaaaactatgtgaagccagtgttcagggaagaaaccacaaccatggtaatcagcagtatctttaccttctctcatatggttatctgactcatcaattactcttatcttcatctgaaatgggacagtcatactcttcttcattatagctatcagacaactgcccttgtgctgaaccacccacattaatgtattttcctccgccaccggccctgctcggccgccatcgctgtgaggcggctgcccgcgacagctcctcctccgcctgccaaatctcgcgatggcagccgcacagttgcggaccagtggcctgctgctaccaaatctcgcgaaactcgttttccctcccgggaagttgccagaactaactctgggcagcatggcgtctttccggcttctccaaacccttgcgaaaaactttattggcaaaaaagaaagttgacagacaatccgtaggcggctgcaaccacgtcaccctccc

SEQ ID NO: 95 - DNA, 515 bp, synthetic construct
  source 1..515: mol_type = other DNA
tcccatcatcctgttataaccattcctttggctctggctttttctcaggcctcctcaccatattgcatctcatgctcagaaataactggctctgtagtcatttcctgccccacctgtgtgtgccttccattgaaatacaaggtttgttagctatagtggtggtgaaaggcaggaacttcagcttcagacgacctgggctcaaatcctgtttctgtaccatacaaagccaatcctccaacttgcctttttccctgacaaacaatgacttgtaccgggtaagtaaatcttatcgagtgactgctatttgagatacagataaccttaagcaaatagttctccctggcaaattcttttttcctttttttttttttctttttttgagacagtctaattctgtcactgaggcacgaggctgtagtgcagtggcactatcatggctcactgcagcctccccgccccctcagaaagaaagttgacagacaatccgtaggccaccagcaccggccactccagct

SEQ ID NO: 96 - DNA, 515 bp, synthetic construct
  source 1..515: mol_type = other DNA
atgcacatctccgctccctcccttaccaaccccctgctgttatgtcctgtgttcaaagtgtccaggaggcagctgggaccactggttcccagggttgtgttaaaagactgagccacatgttaattggatgtggtgtgagaatatcaccctgagggtaacgcttcccttttgcacttctcaagattgtgcagggtggagcagctattgtggacacgcacagggtgacatcatcctgccggggcgtggcccaaccgggaactggggcgtcgaactccccttcccagtctggagccacccattccaggcggggcgggaggctgatcacgtgaccagcgagcggtctcaccctcctcatatgccagtaccacctcctccagtcccagaggggggatgtcttactcctttccgtgaagcaaaccctttgagtacggtttgcgtccacaaagcgtagggtgagaaccttgaaagaaagttgacagacaatccgtaggcgcgtcttcatctactgccgccac

SEQ ID NO: 97 - DNA, 515 bp, synthetic construct
  source 1..515: mol_type = other DNA
gacagatttcaaaaattatttgaagagtatatccaagtgggtctttgaaaattgtaagatctactcagttcttaaaatgaatcagacatgtgaacttgtgtggtctagcggttagaagtgtagactagtgggagtacttctggggttatttgttcatcttttactgacttacatgaccttaagaaagtcacttgagcctcaacatttcctgcaacttcacagaaaggttgtccttgcccacacacccctgacacaccggcgtcgccagccaatggccggggtcctataaacgctacggtccgcgcgctctctggcaagaggcaagaggtagcaacagcgagcgtgccggtcgctagtcgcgggtccccgagtgagcacgccagggagcaggagaccaaacgacgggggtcggagtcagagtcgcagtgggagtccccggaccggagcacgagcctgagcgggagaaagaaagttgacagacaatccgtaggcctcccctacaccttcgtcctcga

SEQ ID NO: 98 - DNA, 515 bp, synthetic construct
  source 1..515: mol_type = other DNA
taaagaaattaaaaacagaactaccatatatgacccagccattccttttctgggcatatacccaaaggaaatgaaatcaccacctcataaagatgtctgcactcccatgttcactgcagcatgattcacaataactaagatatggaaacaacctaagtgtctgatgatggacaaatagagaaagaagtggctgtaagtataccacatttggtttatacaaaatgaatatttcctgtcactaacacattgcccaatcagagctggatattttgaattctttatttgcatgaaaggcctataaaaggagagactctagacacgagcttttatttaagtgcgttcattctcactgctgttattgttttctgacagcatgcctgaaccagctaagtcagctcctgctccgaagaagggttccaagaaggctgtgaccaaggcgcagaagaaggatggcaagaagcgcaaaagaaagttgacagacaatccgtaggcaccgcgacctcgactgccccggc

SEQ ID NO: 99 - DNA, 515 bp, synthetic construct
  source 1..515: mol_type = other DNA
tgggcatggatgaatgttccaggggcaaaaatcaaagagaccagatatactaaatcactgggggaaactttcagtgactcaacttggtacagagtaagaaacataagaagggtgtagccccttgtgcatttatgaaataatggagactgaaaaatgcttactaagcaaaacaaaaccaaaaccaaaaccactaaaaatgtgttttctgctttcacagtgactttcatgtttcctgaacatgccatgctagaaagctacttacgacagttgacctcatcactgccatccttgcagtcagggtccccatcacatcgccacttcttatggatgcactcgccagagccgcactggatttcgctggctggacacttggtgtgtatgactggctgacggccacactgctccagggactcatcagattggtcggagcagtctgcatcatcgtcgcatacccagctgatgggaaagaaagttgacagacaatccgtaggcctcggcaccccctacaaccccag

SEQ ID NO: 100 - DNA, 515 bp, synthetic construct
  source 1..515: mol_type = other DNA
tcatttgatgttacctcaatttccgttttcattctcatacaagaagcagggctcaaccacctttgatgtggtttccagttctccacctcctcccagttcctcaaggtgcttgatccaaatatctgccccatacaaccacctcctggtgaccacctctctatgggacagctagatacaacttgcttgaagcactccactgacccccacattctgcatggacaacacagatatcctggcctgcggtcggggttcggccgggggagggggtccccgtttccctctcctcatcctcgtctcctctggctctggtgacgttgcggtttcctcccccctccagcggagcctcagcgcccgccgcgtccctccctccgcccctttcgcccacacctacccgcccccgccggcccggctctcagtagcgtcgcccgaggctgcagcagcgcatcccggggcatggcgcggcgaaagaaagttgacagacaatccgtaggcgcttccgcgacgcctacgaccgc

SEQ ID NO: 101 - DNA, 515 bp, synthetic construct
  source 1..515: mol_type = other DNA
ttaggcattaacctgaaactagcctgtacaggaagctatacacttgcctcacctcttagctaacatagatcaaagatttcctgaagcctttgtaataacaggaaataaaacaagggctgtgagtggtacaggtgagagaaacacactcgagaggctgctaccggcaggcggacacagcagggcagggccaggcgtgcagagcaagcagccaagctgacctaatggttgggtcctgatgagaaggagccagccatgggaacttgggggaacagcactccaggtagagagaccagcaagtgcaaagaccctgcagaaggaaggagcttagagtctgtgagaacaaagagagaggaagtgggttgggcggggggggtgggcaggaccagccagcacaggatctgtggaggaggaaggtgatctaatctctgttttgaaagttccttctgtctgctgtgtagagaattaaagaaagttgacagacaatccgtaggcccctgctgcatctacggcctctt

SEQ ID NO: 102 - DNA, 515 bp, synthetic construct
  source 1..515: mol_type = other DNA
cataatacaaatgccataatagagaccagttaaaacccagtactattccgtctgtggagcagtgcttggtttcacaccattttcagtctgtctagaattgtttcctgtgtgttagtcactgttaccaccctgtccccaattacaaactaagctcctttaagagatagagcgtaggttattcaatttttgtgccgtgcctcaccttgtctaggacgcagcaaatattagattccttgaggtcagatttggagcttctcattgcacgcggagattattattgcatcgggttccaagccaatgggaagcccgggggaggggtttggcatgaggaagcgttggttacagcagctgattggctgcagccaagactgtgaaaggataaagaggcgcgaggcggaattggggtctgctctaagctgcagcaagagaaactgtgtgtgaggggaagaggcctgtttcgctgtaaagaaagttgacagacaatccgtaggctctccttcagcgcctgcgacttc

SEQ ID NO: 103 - DNA, 515 bp, synthetic construct
  source 1..515: mol_type = other DNA
aatgagctgagctgtttgtttcctctgagccatatacagatgctttttgaactatctttgtgtttgagggaattttttttcatggtatcagcacaccacttcctccaagtcattactttgaaacagttttgtagagggagatattcctgctggccaccagcctagccaagcaaagtgatgactgagggatggcagtaaagctttattagtgcacttcatgtttttggatgtcctggcttcgaggcgggcgccggagggggaactctgaccatgattggttcctcctaaccaggtgaccgcaggtcgcgttccggttggcaggcaccggccagggccagcggccttcagtcggtaggcggcggcggaaggaggaggagctccagccgcgctctctcccggcagtggctgtgcttcacagcgcttgttgggttccccaccccttttaaataagccgggctggtcacaaagaaagttgacagacaatccgtaggccgactgcggcatcgccgacgcct

SEQ ID NO: 104 - DNA, 515 bp, synthetic construct
  source 1..515: mol_type = other DNA
taagccactgaaatgttaaggctgttatttcaaaataatctgtcttatcctgactggtagactaatttagaaaccccactagaatgttctcctaacagtctcctctgtgacagttttcacaactgcaatcacataggtatatgtgagtcatttgtttcatgacctcctcctactagaatgtagcctccaccagggcttgttcacttctggaaccctagcacccagcacactcctacatctgcagaggattaaggtggctgtttctccctggaggtggagtgggtgggtcactgcacaggagcctatagttgttggtcttttaaactcttattggtgtaaccagccacggaactctgaggcaaggggttgggggtgggaagggaaacagagaaaaggcaagtgaaacagaaggggaggtgcagtttcagaacccagccagcctctctcttgctgcctagcctcctaaagaaagttgacagacaatccgtaggctcggctaccgcgacgtcgacaac

SEQ ID NO: 105 - DNA, 515 bp, synthetic construct
  source 1..515: mol_type = other DNA
tcatgtttagtagcattaagtacattcttactggtgcaaccaccattaccacctgtctccagaactttttcatcatttcatactgaagctctgtatccatcaaacattctctttgccccagaaagaagcctcgtatctgttgtcagtcacttcctgttctcctctccctgaaccaccccgaccccccaccccaccacagcaaccaccattctacccggtctctaggaaattcctagagagagagagagaaagggaagttctagtttggggtgagggggcagagaaagaatctggagggatgaaggtcaggcagcagtaagggcttcctaacacctaaacacagagtgacacagataccccccaccgctataccaccgctatctacagctgcgtggcttccgggggtgggacaatcgtcttaaggctttccatgacgtgagtcctcgccagaactaaggctgtggaaagaaagttgacagacaatccgtaggcccaccacttcggcagcgacatcg

SEQ ID NO: 106 - DNA, 515 bp, synthetic construct
  source 1..515: mol_type = other DNA
tctacaaagtattttatatgctatacgcccagtaaactcactgagtatctaatctacaaatttctttggctgagatggggtatccaaagggagccaacgtagctggaaaagtaactacagccagagacctttcacattataaactgagcatctggtacatggtagctattttaagtttctctgaccttgcctgagcgtcagcaggaagtcatacatgaaaaacccttcactcctagccgctgattggctgactggggcgcagcttgacggcgtcgggctggagagccgcagtcccggctgcagcacctgggagaaggcagaccgtgtgagggggcctgtggccccagcgtgctgtggcctccgggagtgggaagtggaggcaggagccttccttacacttcgccatgagtttcctgatcgactccagcatcatgattacctcccaggtgagtcaccgcctcccgaaagaaagttgacagacaatccgtaggcgctactacggcaactccgacggc

SEQ ID NO: 107 - DNA, 515 bp, synthetic construct
  source 1..515: mol_type = other DNA
gaactctgggggaaaagacagaaaatatcaacaagaaatcttgcaattattagaagcagtatggaaaccccacaaggtggcagttatgcattgcagaggacaccagcgagcttccaccttgctgggtttggggaattcccgcactgactcagaggctcaaaaagcagcatctgcccctttccaggcatcagtcacagctcctctgctccctcaagcacctgatcttggactcctaactgttagttggcaaaggatgtaccatctcctattaaacgggcaaggacaagttcccttttctgaggtcccttaagatctcttcctggggtgatctaggcttgctgttttatgagggagggacatatttacacaggggcaagaactagtcttttaatccattgttgcataggggaggcgtgggcacttggagttgtcttaggactgatgtctgaattaactaaatgaacaaagaaagttgacagacaatccgtaggcctgcagctgcttctcccaccgct

SEQ ID NO: 108 - DNA, 515 bp, synthetic construct
  source 1..515: mol_type = other DNA
gtggtggtttaacagtattttaaagacacagggattctttttcccccttttattgaatttaggtcaaagaaagataaagttaaactatagtgctactgggagaagaaggactcgtggctgtaagcggtttgtggttttgtcactatgctaaccttaacaatctatgttacaataatagcttcctcaaaatgaacatctgttgcttggttaagcattattataatgatgagtcctccgccaccggccctgctcggccgccatcgctgtgaggcggctgcccgcgacagctcctcctccgcctgccaaatctcgcgatggcagccgcacagttgcggaccagtggcctgctgctaccaaatctcgcgaaactcgttttccctcccgggaagttgccagaactaactctgggcagcatggcgtctttccggcttctccaaacccttgcgaaaaactttattggcaaaaaagaaagttgacagacaatccgtaggcgctccgtcatcgtcacctactcc

SEQ ID NO: 109 - DNA, 515 bp, synthetic construct
  source 1..515: mol_type = other DNA
tttccgagaaattgtcaaactgttttccaagatggttgaaacattttcttccccatcagcagtgtatgaaggttccaggtgccccacatccttgccaatacctgatatgtttcagtcttactcattttagactttctaataaatacttggtcatgtcttattgtggtttcattttgcatatccccaatgactaataatgttgagcatcttttcatgtccttagtctgttgtcctgttggccactttagttcatcgttgctaccgccggcgtccagaagactacagttcccagcaggcccagggaaagacaggataccctgggtcggctcctccacgtgaccacccactatggcttcctagtgtcagggccagctgtgtagtggctcggtgtgatttgttagctctttgaggcagggtaccctcctcaggatttcgatatgcaaaaaatcaaatctctcatgaccaaagaaagttgacagacaatccgtaggctccccggctacctcggctgcggc

SEQ ID NO: 110 - DNA, 515 bp, synthetic construct
  source 1..515: mol_type = other DNA
accctggcgtcccccagaggtaacccctcccaggaactgggcgtttgccactcccctgcacgggtctacacctctgctacaaacgtgtgtccctaagcagcggacgccttttgaaaacaagtcaactgtatcatgctacgatattttttctgatgtttgtgctgtttctgagacagccttatgacaccttcccctattctgtagcattctgttggctcactttgccacagtcctgaatccgtctgtctggctctgcagggcccgatacccagggcttccgctgtcactcagacatggggggcggggcctagcattccatccaatcagaggcattgtggcgggtccctgcccactgttcctccagacactgagggggtcgcattccttacctcacctttgtccctgcgcgggctgcggctgggatccggtctttccagccccgagagggacctggttcctctgccaaagaaagttgacagacaatccgtaggcaaccgcatcggcgccttcagcag

SEQ ID NO: 111 - DNA, 515 bp, synthetic construct
  source 1..515: mol_type = other DNA
tttgtgttttaactgtcagattgagagtagctctgttgtagcccctttgcagggttcccatgagacttttcctaggtagttacgttgactcgcttagcaacatagcaaattacagaaacggagtaagaacgtaagaaatcgcaaagcacgtgacgtatgggatctcactgttcttggcccttctcccgacccgtagccctgctctgctacgactgcgtgggtgagtcgtctcctcagggcgcagcgcagacttggtgaggtgattattttggcacctgttgccatggctcctccctctctcctgccgggggccggaggcggaccgggggctggcagtcggcagcctccgccccctcaaccttcgcggggcgcgggccgcagcttttcggttcacagcgggcagggaaagccgcgggaagggtactccaggcgagaggcggacgcgagtcgtcgtggcaggaaaaaaagaaagttgacagacaatccgtaggcctaccccaacaacggcatcgact

SEQ ID NO: 112 - DNA, 515 bp, synthetic construct
  source 1..515: mol_type = other DNA
gagttactgggacttggagcaagggcctatttcagcgtagtttccgcttcttgtcacatgacgggagtcagtgggccgcgccttcccactgcgactccccgtgggtccgcaaaccgacacgtcactcctcggccctcaaccaaactgcttggggcacgttctttccgcgctcttgactcctacgcgccggcctatgacagctcggcgggagcatacagacctgcctctagtcctagagacaccctgctggcctccgagaactctgccagcatccatgcggctgctcagggtcgcatctggtcagggccagtgctgtctgtggccggcagttactggttaactcatcctgttcctgtttaacttgttccctggggatggcggcagcctctgacctgtccaggtgccctgtccagctgactgcaaggacagagaggagtcctgcccagctcttggatcagtctgctaaagaaagttgacagacaatccgtaggccctcaacggcatcagcaacgacg

SEQ ID NO: 113 - DNA, 515 bp, synthetic construct
  source 1..515: mol_type = other DNA
gatgtatcacaaataagagggcaaatagggagatggaatagaatgggggaaagcaaaagttttatttacagtaacagcagctcataacagccacactcttttatctgtgaattcatcacttgaggctctgtttttgttagcacagctctatttcctggagcaggacttaatatgacaggaagccattctgctactcatgaggagaatctaaaaccaggttacttctttgctcctccttctgcatttcacacacatttagctatctctgtcgctctgtcacacacacacacacgcacatacacaccatacacacacacacgcacacccgtccgggtccctctcggtgtgtcttccttcaagatgacagggcgctggagaaaaggctgctggaatcagctggtaggtacagtagtaacccgagccccacccaccggctgcctttgcttgctcaggtttctccggtcaaagaaagttgacagacaatccgtaggcgtcgtccgcggcggcggccgctg

SEQ ID NO: 114 - DNA, 515 bp, synthetic construct
  source 1..515: mol_type = other DNA
gatgccaagaaattttaagtgttacgtgtaactgagggcatggaagagcaagtttatctccctatatggccacccacgttttcctttctgtctgactgctggaaggaaagggggaggtaactagaatctttccacacactcatccctgaagcactacccataaagtattaccactgaagagtgaggacatagacagttcactgtattcctcccccaattcctagaagagttccttctgtgggtgttgcagcacaccagcccagcctcgcctagctctctgaaagaaagcctgcaacagaagggagagaagcggccccaagtgcagctgaaagcactccttgggagtcagccaagaccctccatccaagcagggctggatccttgcacttggccatgataaggagatgcttccaggtggcagcaagacttggccaccacagaggccttcttgaggccccccgtataaagaaagttgacagacaatccgtaggctgcatcggctacgaccccttcgg

SEQ ID NO: 115 - DNA, 515 bp, synthetic construct
  source 1..515: mol_type = other DNA
gaaatatagtttgaattccacctcaagaccttgagcttatgacttctgtctagctctgtgtatcattcatacttcccactaatttttaacaaaatgactgggagagggagaaagtgaaacccagtggactgaggcttgagtgagcattacctcctgggcctgttgatttgcgtctccctggtgaccttcttctctgaccagcatccgtgggcttagggaaagcacggtggtcctgaaaaggcaaggaaaaggagaaatgttgcacagtcttatggtctgtcccctgccattctgttcccctgaggtgtcagagcagcttctctgtcttcccagggatgagtttacacagacattccctgtggccccctgaggcctccacctctgaaatctgcagaacagccaggaaacaagcccggcccatggcgccacctactgcctgcctgcctccgctcatgcaccctgggaaagaaagttgacagacaatccgtaggccttcagcctcgacttcagcagct

SEQ ID NO: 116 - DNA, 515 bp, synthetic construct
  source 1..515: mol_type = other DNA
gcaccttcggctatataaaattttcagtggagacaaaaccttaaaatgtaacactacatttgtgtcacttagatcaaaactgaaacagtgtaaaatatacttttgttatgacttttatcttactcactgactagtaagaaataatattttgtattttttcccaatatactttttttttgagacagagtctggctcagtcacccaggctggagtgcagtggcgtgatctcatcctccctccgtcttcacccgccctgggctgcagaggaacagggagtggttttggtggttggcacaggggtagatgttgatggcacgaggccctatcatctgacagctgcctgacccacggtggggagggccctggagggagtgctgcgggagcaggaggggcagttcctataggcagcctgactcccatggtgagcccactgccaccaccacattgccctggggcagccctgcaaagaaagttgacagacaatccgtaggccagcggcatcaccaactaccgcg

SEQ ID NO: 117 - DNA, 515 bp, synthetic construct
  source 1..515: mol_type = other DNA
gaggtaatatatctaagaggttggcacagtgcctggcacatagaaagtgttccatgaagtttctattgcctctgttatgactgagtcatccaggccaaggactgtacctcaaatcactctcaggctgacagatctctctacagtttttgacactccacaaaggagtcagaagagtttcctcagttcttcttttacaaaccagtgttgaagacatttcctgaggaaccccttcctgctgattctgggaacctcacttcctccgcccttgggcttggtggggttgggtagggttgggtggggctgtggttttcttttaggaggcagcaggccaggcctggagaccagagcttaagtgggcctgggcaggctggggttgaaactcttcaccccttgcggtctgtactgcctcccaactgagcagccagggagaaggcctagagcctgtgcctttcagctagatagctaaagaaagttgacagacaatccgtaggccctacttctacaacttcagcatc

SEQ ID NO: 118 - DNA, 515 bp, synthetic construct; identical to SEQ ID NO: 83
  source 1..515: mol_type = other DNA

SEQ ID NO: 119 - DNA, 515 bp, synthetic construct
  source 1..515: mol_type = other DNA
atttctttttaaaaaatcaatatgtcagtatgtttaattctttgccttctacttttaaacttctccgtaaagcaacctttttcgatgacctgctccaccctgactcattctgattacctgctccacccagacttatttcgattacttactccaccctgactcattttccaccctgactcattccaatttcctgctctgttataaccattttccccaacaaaccactcacctcctttcgtccagacaatgaaacgaagaggtggaacgcgcccagtgactacgcccagtagcattaaaatctggcttttcagaatcgaggtgactcattccccggtacattccccagtaactaacagtatataagccagcctttcagcacagaggtgatttcatcttccaggatccaccttgattaaatctcttgtccccagccctcctggtccccaatggcagcagccgccatcaaagaaagttgacagacaatccgtaggctcccccgcgtcaacgacatcctc

SEQ ID NO: 120 - DNA, 515 bp, synthetic construct
  source 1..515: mol_type = other DNA
catcgtcatcatcatcacctaatccttacatgactactgtgaagtagcaaatgtaatcgattgtagagggaaggagatcccggttcaaacagcataagtgactcacccagcatcacagagctagcgtgtgggtggaactgagagtcatgcatcagctcctgcaccacagctgcctccctggcagggagcaggagaacagggtcgtggccaacatccccttgctcactccttccttagtgtcaaaacagccggaaatcaagtccgtttatctcaaactttagcattttgggaataaatgatatttgctatgctggttaaattagattttagttaaatttcctgctgaagctctagtacgataagcaacttgacctaagtgtaaagttgagacttccttcaggtttatatagcttgtgcgccgcttgggtacctcggatgtgagggcgatctggctgcgacatctgaaagaaagttgacagacaatccgtaggccagcggctacttctgcggccaca

SEQ ID NO: 121 - DNA, 515 bp, synthetic construct
  source 1..515: mol_type = other DNA
aaggagctgtaagctcttctcaggccagagacccagggtgctctctgggcaggaggtggctctgctctgtctgccgaactctgggcgtcagcactggggcgtgctggggcctcaacccagccccacctccaaggcaggcggagagcactgctgatggattccccagcactgcactgtgcgaggcccagggcggggaccccagcaggcagcgtggtagggtttgctggggatcctgtagacctctatgaaccaaatatgcttcaggcttgggttgagcacaggagagggaggagggaaaggtcactggggctgggagtgcctacttccctctgtgagtgtcaccccagtccacccagtaccatacctttctctctctggacccacttccttttgctgccggctcctccccattgaataacagccaagttgctttggtttctatttctttgttaagtcgttccctcaaagaaagttgacagacaatccgtaggcacgccagcaccgtctccatcttc

SEQ ID NO: 122 - DNA, 515 bp, synthetic construct
  source 1..515: mol_type = other DNA
tttatgttactttttgcactctgagctcatgattcagccgcaagggaatcacctggagggcttgttaaaagtggatcctaccctcagagtttctgtttcagtaggtttggggtgggaagtagcattctacatttctgtcaagttctctagtgatgctgatgctactggttcacttcgagaactgtagttcttgctttgaagttctgtttctttaatcttttctttatctttcctttcttctcgcctgcacctccctcatctttcctctatgatgacatcgccctggggaagagaagctgagaggaactcctcactcagctagcttcaggagcatgacgtcatctctaccatggaaattccactcactctcctgtgcccccacatttgtcctaggcctcagagtccctataaagagagattcccaagtcagtatcagcacaggacacagctgggttctgaagcttaaagaaagttgacagacaatccgtaggcatcatcagctcccacgacagcat

SEQ ID NO: 123 - DNA, 515 bp, synthetic construct
  source 1..515: mol_type = other DNA
cttccttcctgaatcttccccatcttcttgtggccccatcactgccccactctgtaggataccacaagagaacattgcttgatcattactagactgtgaatcatccctcttccccttccacccatcatattatgaaatcctcttgaagagaccctcaaccctcctttcataactttgaaactccagcactcagcatggtgcttgttgcccagttgggttggtgtcccatatcctaaaatctaaacagcctgtgcttgtgctgacttatggccaccaccctgaaccacttcctggcttcctggctttgctagctgttgaaacagtggaacttgcctcatgtgtgtgtatgtgtgtgtgtgtgattgtgggtgtgggtagtttaacctttttatatcttagctgcctgtaaactcagtgattgctacgttcagatcaaaccttgaacttttttttttctggtgccaaaagaaagttgacagacaatccgtaggctcgacaccctcggctacgtccgc

SEQ ID NO: 124 - DNA, 515 bp, synthetic construct
  source 1..515: mol_type = other DNA
acacatggtctgctggtcattcagagtcacctttgggtctattgactaggttgcacacagttcaattgtgtgttttctttttcacagtgcccctccactcactgaaaaggaagttgaggtaagtgactcaagtgtgttatgaaatttagtgcccgtgcttgactgggcttattcaaaacatttcttcctccagactctagctctgacatttttagacaaaaatgagaaagtcctggcattttaacccctgagtggatgctgacagaagtgctcaacttcagatatttctgccccctcctcttccttcctggcaccacattcctcacgcaccctctccctgatattctgtcccatcctgggactaaacatgtgctgtgtctttaaatgggcggaagtggctggcagtgctttgcttgggtactgcattgattaggagattatatggagctgcgggagctgccgccaaagaaagttgacagacaatccgtaggccttcgacctcaaccgctccaact

SEQ ID NO: 125 - DNA, 515 bp, synthetic construct
  source 1..515: mol_type = other DNA
aacatccacgtggccaccccacccaatacctcgatctccccgttccctgcccatcttgcctctaacttttcttctaccccaactcagccacttccctgcccccatggtcgccccactcctattcaacaccagtgactccagcacctctgaaactcaaccacaaacatcccatcttctcaccacaaccttctagctttctaggcaaaagtgcatcgacttttgcatcccattcctcaaaatatccgccggaggagctttgctagagcgttggtcttggtgtcagagagaattcgctttccttttctgtttcccgcggtgtccttaaccaaaggcctcctctcttcacccgccccgaccaaaaggtggcgtctccctgaggaaactccctccccgccaggcagattacgtttacaaagtcctgagaagagaatcgaaacagaaaccaaagtcaggcaaactctgtaaaagaaagttgacagacaatccgtaggcctgcggcgtcggcatccgcgcct

SEQ ID NO: 126 - DNA, 515 bp, synthetic construct
  source 1..515: mol_type = other DNA
ggtgggtcccttccccaaatgtgcctccttgcagagagccatggttagtagctcctcctcctcctatgcccactgcatacaagcactacctggagcttacagaggtgaagtcacttcctgtctgtaagtaggacataggcgaggaggggagatgaactatgcaggaagtaggacccagagattaagatgtcattatgtaaaataggatttttttttttttttttttttgatcctagaggagccgaccaaacagggaacaagacgacttgcagccgccctacaagggtttggttgcggccaagctgcctctttaaactggctttcctcccccgaggagggagcagggagagagggtggagtgtggtttgcggccaaacctaaaggctgcaattaaccagccgcccggccttcgctactccggacagacgaacgtcttaaaggacgtcttcgctcctcgggagtcgaaagaaagttgacagacaatccgtaggcttcaccggcctcccctcccacgg

SEQ ID NO: 127 - DNA, 515 bp, synthetic construct
  source 1..515: mol_type = other DNA
gggccccaccatcctgcacctggtgcagaaaaaccctgtgaagctgcactacagaaagacaccaccaggtggcaggcctggagattgcatggaggccccgcccccccaaccaattctttgataatagcacagtgttgaagagagggggccataaaagactgaattcctgttcatgccaggctggctctgcccaacatatatgagactgcaagttctgccactgtgggctgtcctcttgttttaaaatagttctgttaagaaatcgttttcgtgatagttttgtctgttcttttaggcttatcttgagtaataaaatagtacaggaagtgagagcgccacaaacaacagtgggtttgctagttctttcgacgtctgtagaacacttgctacgtattctgtgctgacaatacgaacacatgtaagaagtgatgatcctgatggattctcatatactgtactattctaaagaaagttgacagacaatccgtaggcttcaactacagcatctgcgccag

SEQ ID NO: 128 - DNA, 515 bp, synthetic construct
  source 1..515: mol_type = other DNA
ttatcataaaactaaaacatcctatgagtagtaagtcaccaaggccagcatctccagcatgtgctccacttgttaaaatgacgcaagtgagtcactgaatagctcagcatcattttgtcacctctgtgggtgttctgaaaacagatcaagtcgtatcatttctgtatccaaagagagaattcaattaaattacattgttttttgaaactatcactgtttgttaaaactaatccttactcacttttttgatattggatttggaggcaggatgaaagtctttcttgcacatgaagttggcgaaggatttccccatcttggaactggaactagggaaagcaggggctagatctgttagcaacgtaaacaaactcagccgcctaaccggaactgcgtttccagcagcaagggggaacttccgagatcaaaggtgacagcttccggcaactgatgcctccactggccacaaagaaagttgacagacaatccgtaggcggcttctacggcggcaacaacaa

SEQ ID NO: 129 - DNA, 515 bp, synthetic construct
  source 1..515: mol_type = other DNA
ttgattgctcactgcctgtcttggaaggctgtaactctttgactcacacacccagggtctgtgttgacttttgtttatcagtatatttctagaagttagtccagtgtttgaattcaataggtgactaattgttgaatgaatactgcactttctctttgaaactcagctacagtttcactttgctgaagagttctgcactacttaactttttgaaactaatgttctatgtatcctctgctttatgtgaatttctcactttaacttgtttgctccattttgggtgcagacccagccccatgtgcctgaccacaaaccaacatttcctgtctcaattctcctattcatataacgtttgaggacgtttgttaagttttaagaattccctcccacccccagattttcgcagggttttgttgatttcccctcaactttccacaggtatcttaaaagctttgctcactcataaagaaagttgacagacaatccgtaggcaacgtcatctcctacagcgacaa

SEQ ID NO: 130 - DNA, 515 bp, synthetic construct
  source 1..515: mol_type = other DNA
atcacatcagttctaagaatttgacgagtaaaaagcactgggcaggttttaagtcaatagtggccttccaatttctaaagttctttcagagtacaaacacattgcttatactcctctggcatggttttgctcatttgcaggaaaaccatattttgtaccacatcctcacatattgatatgttgaggaaatacacagcaaacaccacttcccatccatctggtaagcttgttccttgctaacctccagctgtgccccttagcaagccgacttccagatctactcggagtactgcaataaccaccccaacgcctgcgtggagctctcccggctcaccaagctcagcaagtacgtgtacttcttcgaggcctgccggctgctgcagaagatgattgacatctccctggatggcttcctgctgactccggtgcagaagatctgcaagtaccctctgcagctggccgagaaagaaagttgacagacaatccgtaggcggcgtcagcaacatcgtctgccc

SEQ ID NO: 131 - DNA, 515 bp, synthetic construct
  source 1..515: mol_type = other DNA
atgtgtatataccatgttttgcttttcattcatctgttgatgaacacttgagttcttcccctctttcagttattgtgagtaatgcctctataaacggtggtgtacaagtatctgtttgagtccctggtttcacttcttttatgtctagcagtggaaatgctgggccatattctatatttaacttttttttttagagacaaggtctctttctgtcacctaggctgggtacatcctttacctatgtgcgctgggcaatggggactctgggcctccccagggccctaacccaggcctctgctcccccacccccttagcacaggatgtggtctttgcatcttcatttgcctgcatttgcatatagcctctcagcactagccttcaatggacccttcaaagtcatgttcttgtccctcacccggaagtctcctggccacattctaggtggggagactgacggctggaggaaagaaagttgacagacaatccgtaggctgcatcacctcctacaccttcgg

SEQ ID NO: 132 - DNA, 515 bp, synthetic construct
  source 1..515: mol_type = other DNA
aactgcaccacggagaacttggttttgtgacaggccatcacacaccactgttcccttgcctcatgttgggtaattggtccagaaatgactcagaggaaagatcaccacctactgtatcacccatatcacttcctgtaacacctgggtttttcttggaatgtttccatccaaatgtatatcatatctgacctgatctgtttgcaagggctgataagattatagcctggggttcctaatttcaagctctagctctttctcagtcgccagcaataaaggactcctgaattagtctcagagtgtggcattctctctatgacttgctcggttacgacatttggaagccccagagagattcgccaccgggtgaagacctgactcattccgggcttccccagacagacagctggcttacagggccacctgaagacgttccagggctccacaggccactgtcttctggagggaaagaaagttgacagacaatccgtaggcctacttcgacagcgccgtcagcg

SEQ ID NO: 133 - DNA, 515 bp, synthetic construct
  source 1..515: mol_type = other DNA
caggtggctatttatgtatctgcattgccctgctatgctgtgaactcctcagggcagagactgggtcatattcattctgtgtccccggtgtctgacagtgcctggcacaaagaaggtgctcacgttggggactgaataaagttcccctggcagaaacccaaaaggttcaaaatgactgttctttcctgtagtcacagaagctcacagggcatttgacttgccctgtatgctcctgccgacaccagagcagttaaagggcgtgccagaggccgagaggcggagccccgggccgccgcgcagacgccccgccccgcccggcgggctgctgggagtcgaggactgggttgctctcctcccttccccggtcccgcccccgtctgtctgtgtcgactgcggacgctatcgataaagttgctgttttgacaacatggcggcgcccatggtccgtggcccggcagtgctcgaaagaaagttgacagacaatccgtaggctccacctcatcggcgccttcttc

SEQ ID NO: 134 - DNA, 515 bp, synthetic construct
  source 1..515: mol_type = other DNA
gttcttttgatttggaataaaatgtgctactcttatgcaaggttacactcacactcatagcaggagttagaaataggtcttcttgttctgcaccaggtgctctagaaagagcagtatagtttcttgttcccctaatgtttactaaaaacttgttgctacttgtcttgtgggtttttcaattctggcttcatgttttaaccctactagacactcagcaaatatgaattagctcctgggccgggaggaggggaagtggggaaggtggagggaaggccgggcacaggggtgaaggcccagagaccagcagaacggcatcccagccacgacggccactttgctctgtctgctctccgccacggccctgctctgttccctgggacacccccgcccccacctcctcaggctgcctgatctgcccagctttccagctttcctctggattccggcctctggtcatccctcccaaagaaagttgacagacaatccgtaggcccgtcgactgcagcgtccacggc

SEQ ID NO: 135 - DNA, 515 bp, synthetic construct
  source 1..515: mol_type = other DNA
gttgctctttgacatgttccagttcccgtcatacacagtcaatacacgtctctctctttttatctttgtttctctttccctcgcctttgctaagtttctgttcatcttgattcatatttcccactcctgtatgaccacgagtgactgtggccaggatcacagagtgggaggctgcctgctaggaatccctctcagcaggctgggtgcccagaggagagtgctgtgtactctcctaagcccggtacaggactcatttgcatggcccctgacgccatgtgacgcagccggctcctcctatataaagaagcaggagccaaaatatctccgagtctgggttggactggcggccgtggagtttgtgacatacgaggtgacacccctcgagtcacttcccttcaactccagctggagcgcctgcttggctttgggttcgttctgcagccttcgccccgctcctagcctcaaaagaaagttgacagacaatccgtaggcgacgccggctgcttcaaccacta

SEQ ID NO: 136 - DNA, 515 bp, synthetic construct
  source 1..515: mol_type = other DNA
actccagcctgggcaacaagaacgaaactccatctcaaaacaaaacaaaacatcatcatgactgagactcactttcagagaagctgattcaattggcgtgggagtatgagaaagggagggaccaggatattggtgtttggggtttttccagttgctacaggtgatttcaattgcagacatcactagctaaagcagtggttctcaaccttgcctgcccattgaaaacaccttccttcttctcgcctgcacctccctcatctttcctctatgatgacatcgccctggggaagagaagctgagaggaactcctcactcagctagcttcaggagccatgacatcatctctaccatggaaattccactcactctcctgtgcccccacatttgtcctaggcctcagagtccctataaagagagattcccaactcagtatcagcacaggacacagctaggttctgaagcttaaagaaagttgacagacaatccgtaggcgcggcttccacaccgacgtctcc

SEQ ID NO: 137 - DNA, 515 bp, synthetic construct
  source 1..515: mol_type = other DNA
ccaatcttatagaaatcaaagctcaaggagcagcatacctccagttgcatagctcactgatattgaaactggaacttgaatacaaacactgttactttagccccatccccttcctgccagaccaccaaggttcccatcaaaaatataagctgatatgagctacagagatatctgtgaaatataaaccttggctttcataaagttgaatttgattcaccaagatgctgcagtcctgacagcgggtaccgcatgactcagagaggccgttgtgagggtgagtcagctgagagtgttcagcacacatgacggtgatgtgcagggttggtaggcaccttgcctggttcttgtttccttcccacactcagtgcgtgacaccagtttatccaagctctttctgcttcctagattcacaggctctttgcctcttcctttcactggctcttttgggattattttccatcttcaaagaaagttgacagacaatccgtaggccagctactgccacctcttcgacc

SEQ ID NO: 138 - DNA, 515 bp, synthetic construct
  source 1..515: mol_type = other DNA
tgactgagctggggctgatggtcggcacggttctgcccaacactgaacacaattctgctgccacaacgctgtgctcatcacaaaaaccacataatgtgtggttagcatctcaaagctcttctctcctttgtagtcacaaagacagcatgtgagagtccaggatgtttattaacagacattcaaagcacatatgtcacccagcacagtggttctctcctgtaatcccagcatcctagtccgcgcggccgagcccgtgtatgcaaatcagccatgtgacggcaaaagccgcctggcccagccctgttcctcagtccatatatgggcagcgacgtcacgggtattgaagacctgcccataaatacttagagcaacactttccgtctaactgagcgaggagcaattgattaatagctcggcgaggggactcactgactgttataataacactacaccagcaactcctgaaagaaagttgacagacaatccgtaggcatctgcttctacgtcagcaccct

SEQ ID NO: 139 - DNA, 515 bp, synthetic construct
  source 1..515: mol_type = other DNA
actcaactcttggaaccttgtattctcagggtgcaatatgagaaacaaatcccacagattgcattgattggttatttgttttggccactctgtaaaacacatcttcctgtttatgccacttatcttgcctgtaacataagaactttagttctgcatatgtggtcagtggtttgcactttttcctcccaagatctacatgcaaaagttgctgttgctgctgctgctacaaatcctccgcgcttgggcccgccctcctcacagccccggagcgcggcctgccggggaggtggatctcgcgctccccacacagtcacactccgcgcactcacacacttggaagcgcctccccacgtccctcccctgccctcctcttgctctgctcttctctccctcaccacaaatagtcgccgacctactgccaatccgcctctcctctctctctctctctgtctcaacatgactgaaaagaaagttgacagacaatccgtaggctcctcggcaactacgtcgacgcc

SEQ ID NO: 140 - DNA, 515 bp, synthetic construct
  source 1..515: mol_type = other DNA
actggatttgctggaaccactcccacacagggcacatacttaggccgaccttttgtagtattgatgtcatcaaccatcatcttatgacagcctcttggtcctctaagtttcttgtaccagcacctgtgccaatgaagtagtggttttcactgtggtgggtattaatagtacagtatccagtctttgcttctcttactttcatttaacttgctcaaggcaaactaaaaccttcctccccgattatttacagcctcagcagagcacggggcgggggcagaggggcccgcccgggagggctgctacttcttaaaacctctgcgggctgcttagtcacagccccccttgcttgggtgtgtccttcgctcgctccctccctccgtcttaggtcactgttttcaacctcgaataaaaactgcagccaacttccgaggcagcctcattgcccagcggaccccagcctctgcaaagaaagttgacagacaatccgtaggccaacggccactccttcatcatct

SEQ ID NO: 141 - DNA, 515 bp, synthetic construct
  source 1..515: mol_type = other DNA
cctgtacttatacccctaaacctaaaacaaaagtgaaaacaagtcactagagaattttagtgggtgccttcttcccagttctaaccacataacccctgtctctgatcagacaagcactgctggaggccaacacagaaacatagctggcaatggctcacagggcatttcccatccagtaatgacctgtctgcctctacttaactcccaacaccacagtggaaagggcaccttcctatttgcagggcagagtgagaagtctagagccttcctactcaaagtatggtttgcaaccagtagcatctgcatctccttggaacttgttagaaatgtagaatctctgacctcaccccagacctacagagtcagaatctgcatgctaataagcccccaggtcctgtgtgctccacaatgcatttgaggagcactcatgtggaatgcagacttgcccctttcctttctggcataaagaaagttgacagacaatccgtaggcctacatccgcagcctcgtcgtcc

SEQ ID NO: 142 - DNA, 515 bp, synthetic construct
  source 1..515: mol_type = other DNA
tggtgcacatccctgctctgctgcgtgatatcttgcaagaacttccccactcagagcctcagtctgccctctgtgaaatgggagaatgatggcacgttacttaccgtggtggggagaaagcgcaggtacctcctagatactctctctcccaccccacctccggcggccaacggccaagcaaacctccagccaagatttggggtatgtgggcagggctccggcgaaggggatcctaatgaagtcacgcgcaccgcgctgccgaactcggtgccccgcgctgggcggggggcgggtaggcctgtccatgtaaatcacatcatttgcgtgccccgccccgccgacgccacttgattccaacatgcaagaaacgccccctcccagacccggcccctcacactgcgttccccctcccgcgcaaagggggcggggcggaggatgcaaatgaacctcgtgtaggccacggaaaagaaagttgacagacaatccgtaggcgcgactacaccgacggcgtcgtc

SEQ ID NO: 143 - DNA, 515 bp, synthetic construct
  source 1..515: mol_type = other DNA
gatttgttccacttttgctggcacacccctggtctgcctagaagttccacaaggacacccccgccccatctgatttgtcactgctgtgtctctagggtccagagcagtactgctctgggactgggatctggggatgcaaggctctgccagccgtgaccaccagggggcatccacgggtcagaaaccacggcttggagacccacccggccaggccacagagagaggtgtgctcctctttccaccaataggaggggcgaatgactccactgaggccacgcccaatgttcaagtctataaaagtcggtgccggaggctcccagctcagatcgccgaagcgtcggactaccgttggtttccgcaacttcctggattatcctcgccaaggactttgcaatatatttttccgccttttctggaaggatttcgctgcttcccgaaggtcttggacgagcgctctagctctgaaagaaagttgacagacaatccgtaggctctactgccacatccgctcctgc

SEQ ID NO: 144 - DNA, 515 bp, synthetic construct
  source 1..515: mol_type = other DNA
gtgggggctgtggctgcggttaacaggccccctctgactaccacaaactttccatgggtcactttctcaccaaaccaaaagtagtcattgcagaagctgcactgtaagactcatggacctacagaccgagctgtacagtaaccttacacaaccacccccacccctctgtgagtcatccccaccccacgcctccacctccagcagtagaactgaagcatagggcatgtgggtcctttccccctctcagcgccgtcctcagtggccacaccaagaacgaggccatgtcttcctgggaagggcctcagatgtcagcaaatgccctggtgtcttgggctgggctgggggcaccagggtgaggtggtggggggagccaacctcactgcccctccccttcctgcctgcccttcttccggggcacccagcagctcggtcctagggcgatgttgacagacagacagaggggcaaagaaagttgacagacaatccgtaggccggcgactaccacatcgtcaacc

SEQ ID NO: 145 - DNA, 515 bp, synthetic construct
  source 1..515: mol_type = other DNA
ctgcaggttgattatacaagacacaattatatcctcagagaaccaggggctttccaattatgggcttttgttctcaggcttgttctcttgtggtcacaagatggctgccacagcaacagtcctcacacaccctctgtgagcaggagggatgtcttcttctcacctcacacatcctctatgagcaggaagggtgtctcctcctcacctatcttttcttttttttaaaccagtcctcttgtttactccttttgcaactcaagccagtcctgctgccttttcatgcccaagcagcatctgtccctccccaagcactgggtggggctcctagaccagctaaaggcgccgagcatctgtgggtgttgcagcacaccagcccagcctcgcctagctctctgaaagaaagcctgcaacagaagggagagaagcggccccaagtgcagctgaaagcactccttgggagtcagaaagaaagttgacagacaatccgtaggctcatcaccaaccgccacagccac

SEQ ID NO: 146 - DNA, 515 bp, synthetic construct
  source 1..515: mol_type = other DNA
aacagttctctcaagttgttttgataaccaagaatttctaagaagaaagtgtgttagatgtgacattgacgtattctaactgggacagaaggaaggtctataaatgatcttgccataaaggtcaggcctcatcctgccacaaccgctgttagctgttacgtgccgcagcagagctcccccatagtctcagctgatactgaaattcatcccactcccctctcacccccagctcctgtgtgtccttcgctcgctccctccctccgtcttaggtcactgttttcaacctcgaataaaaactgcagccaacttccgaggcagcctcattgcccagcggaccccagcctctgccaggttcggtccgccatcctcgtcccgtcctccgccggcccctgccccgcgcccagggatcctccagctcctttcgcccgcgccctccgttcgctccggacaccatggacaagtttaaagaaagttgacagacaatccgtaggctcgacttctcccacttcaacgcc

SEQ ID NO: 147 - DNA, 515 bp, synthetic construct
  source 1..515: mol_type = other DNA
ctttttcttttcagagatggcctgcccagaaaagaggaatctagagaggcagtctagccacagcagccttgctgagctgcggttggctccacccagtttgatcttctgagtggctttgtttacactgtgaaggtaaaaccacatgctcaagcctcagcaatggtggatgcttctccctccaccaaattctagtatcccaggtcgagctcagactgctgtgctggcagtaatcctccttgcagggagtggggccggagagggtaggggagaaaccaagataagtgattggagtcagggcaaatgctgagaaacatctcatgtggtttcctgtgtcatactcttattttccagcaccctctgtacaggaaatcacagggttgttgagcatcttgataagcttcactcagtcatcaggtttcactccagatcctgcaggcatctccccatcctcagctgtttgccagaaagaaagttgacagacaatccgtaggcctactccggcatctaccacggct

SEQ ID NO: 148 - DNA, 515 bp, synthetic construct
  source 1..515: mol_type = other DNA
ttatcattcttcactggtgtggtggtgacaggtgaaatttcagcaggctgatcatacaaggtaaggaaatggaaacaatgagtttagatggtttgaagtctggttaagacaggaaggaaagagataatatctaagtagagtcatatgtcgggtcaatagatcttaaaatacagatagaagacagtaacacattttgtaacttgaggtaacaaaattatgttgaaagggagtcctcacctggcagaaggcatagttttgatgtgaacagttgggggaagcttgtttctctacaccctcaagcacgcccacagcaggagctgagcagcaggccagacggcacagagccctcctgggactggttatttacattaaccaaggtggaaacttctcccggagataggtgctgccaagaaccctagaggaagtaagacgctttatcttttgcacgcacgccaagtcttcagaaagaaagttgacagacaatccgtaggctcttcgtccgctgcatccacaac

SEQ ID NO: 149 - DNA, 515 bp, synthetic construct
  source 1..515: mol_type = other DNA
taatctttctggctacttcctgctgagagggggtcatcgttatggggcaccgaatgcagcactggagtggaaaaagtcgatttgttcccagtagcactctctgtttcgggggtgtagaggcagtacctgctaaaacataatagtaggcaacagcaacacatataaataggttgctgctacttccttcagaagtttcggttgtctagtcttcagttcacagggctttaagatcctcaaatgtcccctgggagggggtcaggtcacagcgcagggaggaagctagtcctctcaaggcctgtctggaatctgtttatcaggttccactccgctgcccgagatcgcttcttccgttactcagtgcccgggggagggacctggcgcactatccaatcagggccgcggggcggggtcgtgagaactgtcaatcaggcgcactgaccggaggagggtgcaaggttcaaagaaaagaaagttgacagacaatccgtaggctctccgacgccggcatctccacc

SEQ ID NO: 150 - DNA, 515 bp, synthetic construct
  source 1..515: mol_type = other DNA
gacagaaaccgctaatgatgggcctgaaactctactttggagtggctgtggtttcctcttccagcctgtgggtttgcaagagaagctgggtttgcaactgagtttgaatgggaaagagattttgctcagggctgcagactgcgtgcatggattctgctttctgttttcaaagctcaaagactgtcctttctaatcattgccatggtgcagtgttggagtctttttatgcttcctcctggtgttgttttgttgcaagggcagcattgtggggctgtggtttgaattgcttttttgtgtctcttgaatacacgaagttcctcctatagtcattggctctgctgcctctgatgaggcacttccgtgttccccacatttgaatttgctcccgattcgagagaggcaggcatccgcggcagcagcttccaacccagacaggcttaagccgcgcgagggtgcccgggtggaaagaaagttgacagacaatccgtaggcacttcaacagcggcggcgccggc

SEQ ID NO: 151 - DNA, 515 bp, synthetic construct
  source 1..515: mol_type = other DNA
aaaatatttgagcagctagttcacaaaagaggatatgaaactggccaatataagagctcaacatcttactcatcagagaaatgcaaatgaaaagtacaatgagataatgcaatgcacccaccacaccagaactgctaaattttttaaaaggaacttgtaatcacaagtgttgatgagaatgtatagtgactggaactctcatatactgctgtgatgtaaattggtacaattcctctttggctttaggaaacgtgttcaactctctgttaagggttttgtggtaaaatggtatctactgctgcccgtacctttcctccccccgaattccagggactcgtactcatttgttatctaaccaatccataaaagactctggattggaggaagcagttatgatgtcagagttatgaaataaagtctcccccaggagaagagggagaaaaacatagcagaggggttgtacaaaagaaagttgacagacaatccgtaggcgactgcttccacaccaccgtctg

SEQ ID NO: 152 - DNA, 515 bp, synthetic construct
  source 1..515: mol_type = other DNA
aggagtaagacaaggaagtgataaaaactgatgtgtgttattgatttcagccaactattgctgacagttcaaagtctgcagtgtagttaccggaatcccacctcaagctcacgtgatgatgtttctgtttctctgccacaaagctttctttaaagctcagttaacaacacagcctgaaatttcagaggtgttaagaactctaggcaaccctcaaccagtgggagaaggcatcctgtggctgagtccacacagtcaaaggcttgtgagaatctggtggatgctggaccttgctgctgctgctactgctgtttccaggggctgcagagcatggactgttaaatcttgcacttcttctgagtgaggtaattagtttgctttatatacaatagttagatgtttttatagctcattgtggttttcccctctctcttacctcctacaagtttgtattcatgagcaattataaagaaagttgacagacaatccgtaggcactgcggcttcagcgcccgcgac

SEQ ID NO: 153 - DNA, 515 bp, synthetic construct
  source 1..515: mol_type = other DNA
gtgaggcttggctggaagagaggaagttgacaaacactttcaatatgcctaatctccaccaatatttggaaatcagctctaagataagaccattgcttggtgattctgtctgctgggaactaacaaagcaactgttcaataaaccatgtgatctgggcatgaaatacaaaatgcccaagtcatgacagttttcagtgttcctacagtagactaggcagtgtgaatgaggatccttgctaacctccagctgtgccccttagcaagccgacttccagatctactcggagtactgcaataaccaccccaacgcctgcgtggagctctcccggctcaccaagctcagcaagtacgtgtacttcttcgaggcctgccggctgctgcagaagatgattgacatctccctggatggcttcctgctgactccggtgcagaagatctgcaagtaccctctgcagctggccgagaaagaaagttgacagacaatccgtaggcctccttctccgtcaacatcgccg

SEQ ID NO: 154 - DNA, 515 bp, synthetic construct
  source 1..515: mol_type = other DNA
cagcagacacggacctcgcagggggcagcgaacccacgtgacacagtcttcaagtcctttggagagccccaggaaggaacaacagcgtgtacaccctgtgatggaatgttctctagggcggttcagtgtgaatggaatgtggggccggtgccattctaattggttctgtttccctctagtggttgatcgcggagatttcggcttctccatcaggacaagttcagatagcctcctggaggtgggctaagacagactccctcaggttcccacatggagcagcctctgcctgccaagcccttccttgctctcgtctcccagatcatctgtcttgtcagcctccatgccctgtgatgtcacaggcctaaatgtgatgtcactttgtcccacatgccctggggaggtagcacaaagggaggaccatggtcttctaactgaggaacctgagcagatgccttgacccagacaaagaaagttgacagacaatccgtaggctgcctcaacgacagcttctgctt

SEQ ID NO: 155 - DNA, 515 bp, synthetic construct
  source 1..515: mol_type = other DNA
gaaactcagtgggtgacaggatgcccacacctcttggaggaggacagaaaggtttgtgggctggtgtcagatacaagcttggcaccatctttgattaggagctaatgttagcagaaagatcaagtgtcagtcatgaccagagttgttttctactatcttgagaaggtcaccggattgctgccccttcgtttttgaaacctgatctggggaccacaaacagccacaatgaatcctgaacagtgtcagacctaggaggtgccccactaccaccctgtctttatcaatgttgtcaccaaagctgtcacaaacaatggggtgtgggctgtcacatggccctgcctaagtaaccacattctcgcttcctccttccacacacagccattgggggttgctcggatccgggactgccgcagggggtgccacagcagtgcctggcagcgtgggctgggaccttgtcactaaagaaagaaagttgacagacaatccgtaggccgcgacggcatcgacgactgctc

SEQ ID NO: 156 - DNA, 515 bp, synthetic construct
  source 1..515: mol_type = other DNA
gcctgcgtggaaggatctaagatggccttatttccttccttagccactcagaaggttgggtggctttgtggtctggggtttaagggaggagttgtacaactctaagaggtggtcaaagtaagggaaactcattatgagctctgtagattctttcttccactaacttgaccttactccataatactaagagacttccctcgcctggtctttctgttttcagatgagctacctccttgctccacatcagtcacaaatgaggccctgaatagacttgggacctctacctgcctgcgcagatgggaggagtctgtggtgttttgtataaacaaccctccctctgagacacacacacatacacatacacatgcacacacacactcatatacacatgcagaagctgtgacacgtgcggaagctgtggtaagtgcatcctccttcagtctcagttctgaaaatagatcatcaaagaaagttgacagacaatccgtaggccggctacttcaaccgcccccact

SEQ ID NO: 157 - DNA, 515 bp, synthetic construct
  source 1..515: mol_type = other DNA
ttacttaccctgtgacaagcccttgggacgggcagtcgcccctctctggcctatgactgctggctgcccccactgacaccttatacccttgatctgatcataaataagaagcagcccggggacctcgagactgaaactgatttagagacttctgggagcttttttcacttccctcctcccatccggccaggacagatccccgcccagaaaggggctgttgactgcagcggtcctgagctgattcaacattcccctgaacttctctcttgctgtttttcttcctagttctgagaaatcgagaaacatgataaggaattggctgactatttttatcctttttcccctgaagctcgtagagaaatgtggtaagtttagaaatgacacgtcaactttgtaaagagggaaatggtggctagaggaaggagtaatctgatctgtttgttgccaagggtttagaatcattcaaagaaagttgacagacaatccgtaggctccgctcctactcctaccccgtc

SEQ ID NO: 158 - DNA, 515 bp, synthetic construct
  source 1..515: mol_type = other DNA
acccccaacccagtcctcctaggattgtttgctttgtgaaacattaaaagtgatttcagccactcattctgtgaaaaagaaaacttgcagtaggagtatctgaagaacatgaattagtcttggcagagctgtgtgggcggtgtcttgtgggcagcactgctgaggtgacagcaaggggaggaggatggattggagccttatatacagcaagcgaaagggattcagagtcttcctcacaggtgggcactgaaggaccagcgggatctacctgggtaccaaaaaggtaacccggccaagtttccagatgaggtagacaaggtttcttcctcagccagggcctcgcctggtagtttgaacaattctagtagagagaaaggatggacaacaaggggagaggagaggagaagccagcctgaccaaggatgctgttaccttccagagcagtctccctgtccagatcaccaaaagaaagttgacagacaatccgtaggcccccctccgtcaacctcgtcagc

SEQ ID NO: 159 - DNA, 515 bp, synthetic construct
  source 1..515: mol_type = other DNA
ccattctaccccagcccacacatacggccttgtggaaactccctgtggcttgctgattaaagaagaaaatgttcaagactagtttccagatgactcttccctggtctaaggacactagcacaattaggactattgttgcaactttcacccgcttaggggcggccttgaaagacaattgagaaggaaaatcttcccaggggcagaactctaagcagtacatctcatgatcctcctagccatcttgctattcctttcttcacgtgcaaaacttgttggaggccagggagagattctctgtccatttcctcttgctgggtgaagtgtcccacaaggcagagtgcacaagcatgcgtgacctcttggaggagactagaaaggaggcataagctacgatgatgtcactgacattaattgttgggctcttgtttttaaaggaacatggcaacccgtgtgtgtctcatcccaaagaaagttgacagacaatccgtaggctccctccgcaacgtcaactacct

SEQ ID NO: 160 - DNA, 515 bp, synthetic construct
  source 1..515: mol_type = other DNA
ggcaatacttggttgtggaattggtgaatcatagggttggtgtatgtttaactttctaagaatctgccaaactgttttccaaaatggttgtaccattttgtgccctcaccagtgtgtgttacagttgcttcacgtcctcaccagcatttgctattgttggtcattttcagcttagccattcgagtgggtgtgaaatgttactgctgtggttttaatttgcatctcctgattcctcaacaataatatcagctatgccatctttcactattttagccagtatcgagttgaatgaacatagaaaaatacaaaactgaattcttccctgtaaattccccgttttgacgacgcacttgtagccacgtagccacgcctacttaagacaattacaaaaggcgaagaagactgactcaggcttaagctgccagccagagagggagtcatttcattggcgtttgagtcagcaaaaagaaagttgacagacaatccgtaggcccgacctcatcccctccaccttc

SEQ ID NO: 161 - DNA, 515 bp, synthetic construct
  source 1..515: mol_type = other DNA
tttaacttgagatttgtggctatcacttttgtttaattgagtaaaccccaataagagtcacaggtgacccccccacaaaaaagttataagtaattatatatgcagaaacattgttagcttggactgacaagcagaaaagcagtacaaagtgaaaagagacttttgtctcccccaaattttactggaaggaaggctaaaaacaaccacgaagccacacaccttgctgtttttcctgtgagtcacaccctgaaacacaggctctcttcctgtcaggactgagtcaggtagaagagtcgataaaaccacctgatcaaggaaaaggaaggcacagcggagcgcagagtgagaaccaccaaccgaggcgccgggcagcgacccctgcagcggagacagagactgagcggcccggccccgccatgcctgcgctctggctgggctgctgcctctgcttctcgctcctcctgaaagaaagttgacagacaatccgtaggctcgacctccccaactccgtcatc

SEQ ID NO: 162 - DNA, 515 bp, synthetic construct
  source 1..515: mol_type = other DNA
gcagggatacagcacttctgagaaatgtgtggctagatgatttcaccgttgtggtgaaatcatgaacatcagagagtgcacttacacaaatctagatggtatggcctactacgcacctaggctatatggtgtagcctattgctcctagactaaaaatctgtacagcgtgttactgtactgaataccatagacaactgtagcacaatggcattcatgtatctaaacatagatcctatgcaggggctggggaccatcaaggatgatgtgtggctggggtgggaggagcagtgacagggctggggcaaggaggacttcagaagccaattggagccaggcttgtctcccagcagccaatatgggagctggggctcctggtaagcgagtggctgctcagaaaccctgcggggaggaggggctagctaggctgggccaggatccctgtataaatggcccaggagctgtgcaaagaaagttgacagacaatccgtaggcgacaacaacatcgaccgcatctc

SEQ ID NO: 163 - DNA, 515 bp, synthetic construct
  source 1..515: mol_type = other DNA
agggaacttctgtgtctgagtgggaggcaggcgtcattggcctctacaggaaaggtctgatgctgcctggcatgtgacctcagctcagccaatcagatgctcctgcccagagaggggagactccattctggtagtggctgcagcaaccagtttcaggagaggagtgactttcgttcagtgttcaggggtggagaccacagagtcctcaccacaatggttccgtggcataatccttacttggccactaggaaagcacctccccctttccaaaaatgctccggaagtgccttcgccctccgtaaagatggccggggcagtcggcacgagggaggcggggatgcgcctgcgcaacaagttcggcggggaagatggcggatgacaaggtgagtggccgtgggggtgatctgcagccgggcgtggtcttcactctccttgacctttttagttccggggagaagcgactcaaagaaagttgacagacaatccgtaggctcatcaccgcccgctacctccgc

SEQ ID NO: 164 - DNA, 515 bp, synthetic construct
  source 1..515: mol_type = other DNA
tgaccattttctgctgctgcaatccggatgcctccaaatctcaagtgacactcagtttcttaggttttttccttcctcaaaaatgaaacctctctgggcatccccttacaaccttctctttagctttgagttgagtttctttcctgtattctaattaaagtgaccatagtgttaggtttttccatttctctagaagattggctttttggtagtagtgttttctggatctctcctccgccaccggccctgctcggccgccatcgctgtgaggcggctgcccgcgacagctcctcctccgcctgccaaatctcgcgatggcagccgcacagttgcggaccagtggcctgctgctaccaaatctcgcgaaactcgttttccctcccgggaagttgccagaactaactctgggcagcatggcgtctttccggcttctccaaacccttgcgaaaaactttattggcaaaaaagaaagttgacagacaatccgtaggctgccacaccatcgactgcttcga

SEQ ID NO: 165 - DNA, 515 bp, synthetic construct
  source 1..515: mol_type = other DNA
gtactaagtgtgacctcaggcatgttgctttccttccctggactgctttcaagagaataaaaaatgtacttaacatgatcagcacggggcctggctcattgcagatactgtgcaaaggtgattcaactaagacatgaacactaaaaaggagacactcttaactcatgcaccactaagaacttgcagaggactcatccctgtggttagagctttggagagtaaggaaatgatcctccgcgccacagttgggtcttccgggtttctgtctcaactatgcacgcccctcccccgtgcgcgcccctcacctggcctcccagctacccgaagtgacaggtggacggagggaggagtggccagtggaggcatcagttgccggaagctgtcacctttgatctcggaagttcccccttgctgctggaaacgcagttccggttaggcggctgagtttgtttacgttgctaacaaaagaaagttgacagacaatccgtaggccgcgactacagcaccgtccgcac

SEQ ID NO: 166 - DNA, 515 bp, synthetic construct
  source 1..515: mol_type = other DNA
tctgtggggtaagttccacttgcttaggatcaagatgtattgactttgagggaggaaaccgatgaatggtaagaagccataaactgcaaacactagctagtggtttaaggtgtggtggtatagctactgagctctgtgtaaccagaagctaaaagacaagagtctaaccgatgagggatgtttgtaagagatcttgactttcgatgtttttggagaaatctttttttttttcctgaaccagaataagggtaatgttttcctctgtcttcaaaatcatcaataatccatgcattgtttaactcatgtcataagcaataatgcctttcatatagccattggcatcaaagaagaaacacccccttgatttgatggtaagcgtgacactacataaactcccagaaaacccacttcctttccagcaaatagaaaacaaccgagagcctgaattcactgtcagctttgaaaaagaaagttgacagacaatccgtaggccgtcttcagcgccgtctacagcg

SEQ ID NO: 167 - DNA, 515 bp, synthetic construct
  source 1..515: mol_type = other DNA
aggaggattgcttgagtgtgggaggttgagactatggtgagtcaaactgcaccactccactccaacctgagcaacagagtgaaaccttgtctcaggaaaaacacacaaaaacccttccttctgacccctccctactaaatgaattttggatttcgtagaatgttattcagaacctgactctaatctatctttcagtgcttactcatctttttcttacactgagcacctaatcctataactacactctttgtctaaaagggccaagttctcatcagaacactttgctgagccccgggtgaccgaatccctagctctggggtgagcgacatgcctccaaggagctgcagccaggagacagccaggcgaaggcggggctctgcctctgggctccccgaggggcggaggccggcgcgcgggtcacgtgggggcgcgggaggcggggcttgcacacgctggtcacgcggaaagaaagttgacagacaatccgtaggctgcagctacggctactgcaccat

SEQ ID NO: 168 - DNA, 515 bp, synthetic construct
  source 1..515: mol_type = other DNA
tcattttagtattgactctacctcatctggtctcctcctcaaattgtattagccgcctgtcatgctgacatcctgtatacttgtgtcattcaactgtcctatataatcattcactaagtgctggggcacagcagtcttcaatttaacttaaccagagccctgaaaacagcaatggttaagaaattccctcctaccttccccacacttagctaagacttgctgtccactcttcctagccagggttccataaacaaatccttcttagttagccttggtagctcaacacctttggtatctcactcacttaactgccacgcctactcttgttggatccggttataaagtaaactatgttctttgagaactgttgcatacagatgagttggcagccggtctgagctggcccacagactcataaaatcaacagggcctcgggtaccctcacctagcatatccaaactcttaaagaaagttgacagacaatccgtaggcgaccgctacatcagctacgtctc

SEQ ID NO: 169 - DNA, 515 bp, synthetic construct
  source 1..515: mol_type = other DNA
gaaacaaacaatgtcctccatctggattgtgcctgctgtaggaacaggaagtaggctctgctcatgtctgggtatccactgctttcagatcacagacaatcagtcactgctcctcacacagctgctaagtggtgtgatcaggactgaaaccccagtgcctctgacttcaaagcctatgctgctccactgcaccacagcatccatttcatcaaagtcaggaattcccctgttccttagagtccaggttcctgcttccagccttctggtagaccaggccctgccacaagtgagagttggccggttgggtatctggtttagtcactcgcctccacactttcacatcctctatcaaaacctgcacacttgggttgtgaccacacatgctcttcctgtttgtacagaaagtgccattcagaaagctcgccagcgagaagagagctccacgctcagcctcagaagaaagaaaagaaagttgacagacaatccgtaggccaacttcggccacggctgcgacg

SEQ ID NO: 170 - DNA, 515 bp, synthetic construct
  source 1..515: mol_type = other DNA
tgctgccacacaagcccctgtgccctcccatctttagtgagagcctcctttgtaccaggcaccaggctttagcaatgactaacatgtggtcttcaccttcttagagctgtgttcatttttgtgtggtgtcatttgccttgtggtcagctttgctaaaactgatcaaactccaagctgtcttccaggcccactcttatgttttctgttgattctctgacttgagcttagagtcctaatatttctgtttgttggcaaaacccttttgggttgttcatcaccttttatgtcattatagatgtaaacaacatgtgtgctccagatggactctgaaatccaggctcccactttatgacacactcctctacaacaccagagactcccaaacacaaggccttatattgactcatttcagctcacatcctggcgactctcaagagagaaacctcagagtgactaaaatctccaaagaaagttgacagacaatccgtaggctctccagcaaccactgcgactgc

SEQ ID NO: 171 - DNA, 515 bp, synthetic construct
  source 1..515: mol_type = other DNA
ggcagagtcttcagttgcttatcacagggacttccttgcagagctgtttgagtgcccctctggcatggcagttggcttcttctgcaatgagtgatctaagagcaagagcaaggaggaagccacaatgcatgtaatgacttattctcacgggttgcacattgtcactgctgccacattgaattcgctaaaactcagttactgactacagaccacaccctaggagagaagaatcctcctagatatgcacatgtcatcaaaggatagcattttacagagtcaacaccactcacttcatagaacaaggggccagtggcttttcagaagaagggtctgttctcggccccacaccagaacgccagccgccaggtcccgctgctcagcaggtctcaagcccgcgctcactcgggctccggctgctgacagctgcgagcccgcgcgtgtatacccgctcaacgctgggacgtaaagaaagttgacagacaatccgtaggcccgcggcatcgtctccggcttca

SEQ ID NO: 172 - DNA, 515 bp, synthetic construct
  source 1..515: mol_type = other DNA
tggcttctagggaacgagtgcggaaatgcgtgcgggtgtgggagcgcaccactcagtagggtaggacctctcccagcgctaggtcactgcagcattcttcccaccatctgctcctgtcaccagcccctaactccgcccctttgggcccgccccttgttccgaagccaatagcaacccctgaccgccctacaccgcccagaagcctttccacaccccctcgtcctgggagctccttgcaccaatcagcgctctgtaaaatgcaggaatctaaaagtagccaatcacagggaggattgaaaaaagggcactctgataggacagaaatagcaaatgggcagggacaaacaagggtgtaaaagctggccccctgccccccacccattcctgttagcccgcagcagcaacctgctcaggtcggtttccacgctatggaagccttgttctttcgcgttctttcgctcttcaaagaaagttgacagacaatccgtaggcgactccggcgacctctgcagcgt

SEQ ID NO: 173 - DNA, 515 bp, synthetic construct
  source 1..515: mol_type = other DNA
acacatggtctgctggtcattcagagtcacctttgggtctattgactaggttgcacacagttcaattgtgtgttttctttttcacagtgcccctccactcactgaaaaggaagttgaggtaagtgactcaagtgtgttatgaaatttagtgcccgtgcttgactgggcttattcaaaacatttcttcctccagactctagctctgacatttttagacaaaaatgagaaagtcctttcaggtaccacttccagagaaataccagcttgaagcccagctactgccacctcaggcccataggcacactggggcccatttgctcccaggcttcagtgggaggcgacgactcagcaccttcgactccagcctcgcagcggccccgccccacagaggcctggccccgcccctccgcgctcaggccccgcccccagctccgagggcggctggcccggtcgcggtcgcggctaaagaaagttgacagacaatccgtaggcactactgcatcatctacgcccgc

SEQ ID NO: 174 - DNA, 515 bp, synthetic construct
  source 1..515: mol_type = other DNA
acccccggtgtgaaactctttctgagaaagactggcccttttctttaatgtaaaaaaatatatataacaaaaatagatttcttctcaagactcttgtttattcagatgatatcaattctgtttccagcacaacatgttgtagctgctactcagagatttttagaaagtcagatcaacgcgactgcaatgggtttttgccgtgagtgagctgtgcttctcacttgcttacttcctgcggggaggatcctgatcgaggagctgagggaccgatttccctacctgagtgaaagctacttaatcaccaccgatgccgccggctccatcgccacagctacaccggatggtgaggaagtggagggaggggtgagagtgagaactggtttttttgggaaagccccttagatatagctgacaaaacttgttctgcaaatatccagaaggcagccactcttatattcccctcaaaagaaagttgacagacaatccgtaggcggcttcgccggcaactccaactt

SEQ ID NO: 175 - DNA, 10 bp, synthetic construct
  source 1..10: mol_type = other DNA
ratgawtcat

SEQ ID NO: 176 - DNA, 19 bp, synthetic construct
  source 1..19: mol_type = other DNA
nntgawtcatsnnnrrant

SEQ ID NO: 177 - DNA, 15 bp, synthetic construct
  source 1..15: mol_type = other DNA
tgawtcatsnynrra

SEQ ID NO: 178 - DNA, 13 bp, synthetic construct
  source 1..13: mol_type = other DNA
gatgawtcaynnn

SEQ ID NO: 179 - DNA, 10 bp, synthetic construct
  source 1..10: mol_type = other DNA
datgawtcat

SEQ ID NO: 180 - DNA, 12 bp, synthetic construct
  source 1..12: mol_type = other DNA
datgawtcathn

SEQ ID NO: 181-182 - skipped (2 entries)

SEQ ID NO: 183 - DNA, 12 bp, synthetic construct
  source 1..12: mol_type = other DNA
ggatgactcatc

SEQ ID NO: 184 - DNA, 18 bp, synthetic construct
  source 1..18: mol_type = other DNA
nnsnnngaantganswsn

SEQ ID NO: 185 - skipped

SEQ ID NO: 186 - DNA, 12 bp, synthetic construct
  source 1..12: mol_type = other DNA
ndatgawtcayn

SEQ ID NO: 187 - DNA, 15 bp, synthetic construct
  source 1..15: mol_type = other DNA
gntttrttnactcac

SEQ ID NO: 188 - DNA, 17 bp, synthetic construct
  source 1..17: mol_type = other DNA
rtcggcyaanscggcan

SEQ ID NO: 189 - DNA, 29 bp, synthetic construct
  source 1..29: mol_type = other DNA
actctttctctgctgcaayacctgctgty

SEQ ID NO: 190 - skipped

SEQ ID NO: 191 - DNA, 10 bp, synthetic construct
  source 1..10: mol_type = other DNA
ygtctagaca

SEQ ID NO: 192 - DNA, 12 bp, synthetic construct
  source 1..12: mol_type = other DNA
nnatgawtcath

SEQ ID NO: 193 - DNA, 11 bp, synthetic construct
  source 1..11: mol_type = other DNA
gaaatgagtca

SEQ ID NO: 194 - DNA, 12 bp, synthetic construct
  source 1..12: mol_type = other DNA
gatgactcatcn

SEQ ID NO: 195-196 - skipped (2 entries)

SEQ ID NO: 197 - DNA, 14 bp, synthetic construct
  source 1..14: mol_type = other DNA
nrtgawtcatccnn

SEQ ID NO: 198 - skipped

SEQ ID NO: 199 - DNA, 17 bp, synthetic construct
  source 1..17: mol_type = other DNA
nnnatgmatasttaatn

SEQ ID NO: 200 - skipped

SEQ ID NO: 201 - DNA, 12 bp, synthetic construct
  source 1..12: mol_type = other DNA
ncgaccaccgaa

SEQ ID NO: 202 - DNA, 14 bp, synthetic construct
  source 1..14: mol_type = other DNA
aaagtcaaaagtca

SEQ ID NO: 203-204 - skipped (2 entries)

SEQ ID NO: 205 - DNA, 15 bp, synthetic construct
  source 1..15: mol_type = other DNA
nnnrctcacaggycc

SEQ ID NO: 206-207 - skipped (2 entries)

SEQ ID NO: 208 - DNA, 11 bp, synthetic construct
  source 1..11: mol_type = other DNA
rgtcgtaaaan

SEQ ID NO: 209 - DNA, 11 bp, synthetic construct
  source 1..11: mol_type = other DNA
nggtgawtcat

SEQ ID NO: 210 - DNA, 24 bp, synthetic construct
  source 1..24: mol_type = other DNA
canntggcgcccaacatkggncnn

SEQ ID NO: 211 - skipped

SEQ ID NO: 212 - DNA, 15 bp, synthetic construct
  source 1..15: mol_type = other DNA
ttaaccctttvnkkn

SEQ ID NO: 213 - DNA, 10 bp, synthetic construct
  source 1..10: mol_type = other DNA
atgacgtcay

SEQ ID NO: 214 - DNA, 15 bp, synthetic construct
  source 1..15: mol_type = other DNA
artkgttctgctnnn

SEQ ID NO: 215 - DNA, 12 bp, synthetic construct
  source 1..12: mol_type = other DNA
tgacaggtgtca

SEQ ID NO: 216 - DNA, 14 bp, synthetic construct
  source 1..14: mol_type = other DNA
ggttgccatggcaa

SEQ ID NO: 217 - DNA, 15 bp, synthetic construct
  source 1..15: mol_type = other DNA
acyawtgtrrtmatt

SEQ ID NO: 218 - DNA, 12 bp, synthetic construct
  source 1..12: mol_type = other DNA
tgacagwtgtca

SEQ ID NO: 219 - DNA, 12 bp, synthetic construct
  source 1..12: mol_type = other DNA
ntgattgacagn

SEQ ID NO: 220 - DNA, 10 bp, synthetic construct
  source 1..10: mol_type = other DNA
gatgacgtca

SEQ ID NO: 221 - skipped

SEQ ID NO: 222 - DNA, 16 bp, synthetic construct
  source 1..16: mol_type = other DNA
aacaatrtncaktgtt

SEQ ID NO: 223 - DNA, 17 bp, synthetic construct
  source 1..17: mol_type = other DNA
nkcactaynrtagtgmn

SEQ ID NO: 224 - DNA, 14 bp, synthetic construct
  source 1..14: mol_type = other DNA
nntgactcagcann

SEQ ID NO: 225 - DNA, 13 bp, synthetic construct
  source 1..13: mol_type = other DNA
nggggastccccn

SEQ ID NO: 226 - skipped

SEQ ID NO: 227 - DNA, 10 bp, synthetic construct
  source 1..10: mol_type = other DNA
tgctgagtca

SEQ ID NO: 228 - DNA, 12 bp, synthetic construct
  source 1..12: mol_type = other DNA
tgacagctgtca

SEQ ID NO: 229 - DNA, 11 bp, synthetic construct
  source 1..11: mol_type = other DNA
taayyyaatca

SEQ ID NO: 230 - DNA, 13 bp, synthetic construct
  source 1..13: mol_type = other DNA
tgctgawtcagca

SEQ ID NO: 231 - DNA, 16 bp, synthetic construct
  source 1..16: mol_type = other DNA
grgttcatygrgttca

SEQ ID NO: 232 - DNA, 15 bp, synthetic construct
  source 1..15: mol_type = other DNA
ctttcantatgactv

SEQ ID NO: 233 - DNA, 11 bp, synthetic construct
  source 1..11: mol_type = other DNA
gaccacccang

SEQ ID NO: 234 - DNA, 20 bp, synthetic construct
  source 1..20: mol_type = other DNA
catnccsnnnngrtgawkym

SEQ ID NO: 235 - skipped

SEQ ID NO: 236 - DNA, 12 bp, synthetic construct
  source 1..12: mol_type = other DNA
cctgtcaatcan

SEQ ID NO: 237 - DNA, 11 bp, synthetic construct
  source 1..11: mol_type = other DNA
gaccacccamg

SEQ ID NO: 238 - DNA, 21 bp, synthetic construct
  source 1..21: mol_type = other DNA
nssntgctgawtcagcanssn

SEQ ID NO: 239 - DNA, 10 bp, synthetic construct
  source 1..10: mol_type = other DNA
tgctgactca

SEQ ID NO: 240 - DNA, 12 bp, synthetic construct
  source 1..12: mol_type = other DNA
ngrtgacgtcay

SEQ ID NO: 241 - DNA, 11 bp, synthetic construct
  source 1..11: mol_type = other DNA
ggtcgtaaaan

SEQ ID NO: 242 - DNA, 12 bp, synthetic construct
  source 1..12: mol_type = other DNA
aggtctctaacc

SEQ ID NO: 243 - skipped

SEQ ID NO: 244 - DNA, 21 bp, synthetic construct
  source 1..21: mol_type = other DNA
cngcyyttttstnaccnnncn

SEQ ID NO: 245 - DNA, 12 bp, synthetic construct
  source 1..12: mol_type = other DNA
gtgcgcatgcgc

SEQ ID NO: 246 - DNA, 12 bp, synthetic construct
  source 1..12: mol_type = other DNA
nrtgacgtcayn

SEQ ID NO: 247 - DNA, 12 bp, synthetic construct
  source 1..12: mol_type = other DNA
gatgactcagca

SEQ ID NO: 248 - skipped

SEQ ID NO: 249 - DNA, 20 bp, synthetic construct
  source 1..20: mol_type = other DNA
ngtgccnnnnnnnyagcacn

SEQ ID NO: 250 - DNA, 14 bp, synthetic construct
  source 1..14: mol_type = other DNA
atgactcagcanss

SEQ ID NO: 251 - DNA, 20 bp, synthetic construct
  source 1..20: mol_type = other DNA
cggctgcngnnnncagataa

SEQ ID NO: 252 - DNA, 16 bp, synthetic construct
  source 1..16: mol_type = other DNA
nrrggtcaaaggtcan

SEQ ID NO: 253 - DNA, 10 bp, synthetic construct
  source 1..10: mol_type = other DNA
actgaaacca

SEQ ID NO: 254 - DNA, 11 bp, synthetic construct
  source 1..11: mol_type = other DNA
amccggatgts

SEQ ID NO: 255 - DNA, 18 bp, synthetic construct
  source 1..18: mol_type = other DNA
nagtttcabthtgactns

SEQ ID NO: 256-257 - skipped (2 entries)

SEQ ID NO: 258 - DNA, 10 bp, synthetic construct
  source 1..10: mol_type = other DNA
gccccrccch

SEQ ID NO: 259 - skipped

SEQ ID NO: 260 - DNA, 10 bp, synthetic construct
  source 1..10: mol_type = other DNA
tggcagttgg

SEQ ID NO: 261 - DNA, 12 bp, synthetic construct
  source 1..12: mol_type = other DNA
gggggtgtgtcc

SEQ ID NO: 262 - DNA, 15 bp, synthetic construct
  source 1..15: mol_type = other DNA
tgctgactcagcans

SEQ ID NO: 263 - DNA, 15 bp, synthetic construct
  source 1..15: mol_type = other DNA
nnnawccggaagygw

SEQ ID NO: 264 - DNA, 15 bp, synthetic construct
  source 1..15: mol_type = other DNA
rrggtcaaaggtcan

SEQ ID NO: 265 - skipped

SEQ ID NO: 266 - DNA, 12 bp, synthetic construct
  source 1..12: mol_type = other DNA
aaaarccccaga

SEQ ID NO: 267-269 - skipped (3 entries)

SEQ ID NO: 270 - DNA, 15 bp, synthetic construct
  source 1..15: mol_type = other DNA
assntgctgagtcat

SEQ ID NO: 271 - DNA, 13 bp, synthetic construct
  source 1..13: mol_type = other DNA
sstatgcsaatts

SEQ ID NO: 272 - DNA, 15 bp, synthetic construct
  source 1..15: mol_type = other DNA
nsgatarnnatcswn

SEQ ID NO: 273 - DNA, 10 bp, synthetic construct
  source 1..10: mol_type = other DNA
ascagctgat

SEQ ID NO: 274 - DNA, 15 bp, synthetic construct
  source 1..15: mol_type = other DNA
assstgctgagtcat

SEQ ID NO: 275 - DNA, 15 bp, synthetic construct
  source 1..15: mol_type = other DNA
ntttcawttccycnt

SEQ ID NO: 276 - skipped

SEQ ID NO: 277 - DNA, 12 bp, synthetic construct
  source 1..12: mol_type = other DNA
tggggaagggcm

SEQ ID NO: 278 - skipped

SEQ ID NO: 279 - DNA, 15 bp, synthetic construct
  source 1..15: mol_type = other DNA
nagatsnbnatctnn

SEQ ID NO: 280-281 - skipped (2 entries)

SEQ ID NO: 282 - DNA, 20 bp, synthetic construct
  source 1..20: mol_type = other DNA
sntgctgawtcagcanstty

SEQ ID NO: 283 - DNA, 20 bp, synthetic construct
  source 1..20: mol_type = other DNA
rgtstcgnnnnnnygasact

SEQ ID NO: 284 - DNA, 18 bp, synthetic construct
  source 1..18: mol_type = other DNA
nntgctgawtcagcanss

SEQ ID NO: 285 - DNA, 10 bp, synthetic construct
  source 1..10: mol_type = other DNA
aacagctgtc

SEQ ID NO: 286 - DNA, 12 bp, synthetic construct
  source 1..12: mol_type = other DNA
htgctgagtcat

SEQ ID NO: 287 - skipped

SEQ ID NO: 288 - DNA, 18 bp, synthetic construct
  source 1..18: mol_type = other DNA
nntrgntttctgttnnyn

SEQ ID NO: 289 - skipped

SEQ ID NO: 290 - DNA, 17 bp, synthetic construct
  source 1..17: mol_type = other DNA
natgactcagcanstnn

SEQ ID NO: 291 - DNA, 21 bp, synthetic construct
  source 1..21: mol_type = other DNA
nycntttccnggaanncnnnn

SEQ ID NO: 292 - skipped

SEQ ID NO: 293 - DNA, 14 bp, synthetic construct
  source 1..14: mol_type = other DNA
nngrnarcagmtgn

SEQ ID NO: 294 - DNA, 12 bp, synthetic construct
  source 1..12: mol_type = other DNA
actttcgtttct

SEQ ID NO: 295 - DNA, 17 bp, synthetic construct
  source 1..17: mol_type = other DNA
nyaaactgtnragygcn

SEQ ID NO: 296 - DNA, 14 bp, synthetic construct
  source 1..14: mol_type = other DNA
ggccmcgcccmcyn

SEQ ID NO: 297 - skipped

SEQ ID NO: 298 - DNA, 14 bp, synthetic construct
  source 1..14: mol_type = other DNA
cagtcaccytcsgg

SEQ ID NO: 299 - DNA, 14 bp, synthetic construct
  source 1..14: mol_type = other DNA
nnrtgacgtcaycm

SEQ ID NO: 300 - DNA, 12 bp, synthetic construct
  source 1..12: mol_type = other DNA
nrbcarrggtca

SEQ ID NO: 301 - skipped

SEQ ID NO: 302 - DNA, 20 bp, synthetic construct
  source 1..20: mol_type = other DNA
cntttmcyggaartwannnn

SEQ ID NO: 303-304 - skipped (2 entries)

SEQ ID NO: 305 - DNA, 12 bp, synthetic construct
  source 1..12: mol_type = other DNA
wchtgtttacat

SEQ ID NO: 306 - skipped

SEQ ID NO: 307 - DNA, 14 bp, synthetic construct
  source 1..14: mol_type = other DNA
tagggcaaaggtca

SEQ ID NO: 308 - skipped

SEQ ID NO: 309 - DNA, 20 bp, synthetic construct
  source 1..20: mol_type = other DNA
actyknattcgtgntacttc

SEQ ID NO: 310 - skipped

SEQ ID NO: 311 - DNA, 24 bp, synthetic construct
  source 1..24: mol_type = other DNA
nnnnnnnnggkgggrgcgtccccc

SEQ ID NO: 312 - skipped

SEQ ID NO: 313 - DNA, 15 bp, synthetic construct
  source 1..15: mol_type = other DNA
ntgtcygtctgtccn

SEQ ID NO: 314 - DNA, 16 bp, synthetic construct
  source 1..16: mol_type = other DNA
ngncrrtcactygccn

SEQ ID NO: 315 - skipped

SEQ ID NO: 316 - DNA, 12 bp, synthetic construct
  source 1..12: mol_type = other DNA
agcagctgctgc

SEQ ID NO: 317 - DNA, 10 bp, synthetic construct
  source 1..10: mol_type = other DNA
cggtttcaaa

SEQ ID NO: 318 - DNA, 12 bp, synthetic construct
  source 1..12: mol_type = other DNA
atgacgtcatcc

SEQ ID NO: 319 - skipped

SEQ ID NO: 320 - DNA, 11 bp, synthetic construct
  source 1..11: mol_type = other DNA
nttccswagaa

SEQ ID NO: 321 - skipped

SEQ ID NO: 322 - DNA, 18 bp, synthetic construct
  source 1..18: mol_type = other DNA
taattgwnntttaattgn

SEQ ID NO: 323 - DNA, 15 bp, synthetic construct
  source 1..15: mol_type = other DNA
tgacanarrccagrc

SEQ ID NO: 324 - DNA, 18 bp, synthetic construct
  source 1..18: mol_type = other DNA
taattgwsstttaattgc

SEQ ID NO: 325 - skipped

SEQ ID NO: 326 - DNA, 18 bp, synthetic construct
  source 1..18: mol_type = other DNA
ynytywtyncngcngcnw

SEQ ID NO: 327 - DNA, 12 bp, synthetic construct
  source 1..12: mol_type = other DNA
vdgggyggggcy

SEQ ID NO: 328 - skipped

SEQ ID NO: 329 - DNA, 12 bp, synthetic construct
  source 1..12: mol_type = other DNA
rgkgggcggagc

SEQ ID NO: 330 - DNA, 16 bp, synthetic construct
  source 1..16: mol_type = other DNA
nraccgcaaaccgcan

SEQ ID NO: 331 - skipped

SEQ ID NO: 332 - DNA, 12 bp, synthetic construct
  source 1..12: mol_type = other DNA
acaggatgtggt

SEQ ID NO: 333 - skipped

SEQ ID NO: 334 - DNA, 11 bp, synthetic construct
  source 1..11: mol_type = other DNA
tcaaggtcasn

SEQ ID NO: 335 - skipped

SEQ ID NO: 336 - DNA, 15 bp, synthetic construct
  source 1..15: mol_type = other DNA
nrgnncaaagkycan

SEQ ID NO: 337-338 - skipped (2 entries)

SEQ ID NO: 339 - DNA, 12 bp, synthetic construct
  source 1..12: mol_type = other DNA
atgccctgaggc

SEQ ID NO: 340 - skipped

SEQ ID NO: 341 - DNA, 14 bp, synthetic construct
  source 1..14: mol_type = other DNA
ygccmyctdwtggc

SEQ ID NO: 342 - DNA, 15 bp, synthetic construct
  source 1..15: mol_type = other DNA
tgttkcctagcaacm

SEQ ID NO: 343 - DNA, 20 bp, synthetic construct
  source 1..20: mol_type = other DNA
wmcagtcsgakggaggaggc

SEQ ID NO: 344 - skipped

SEQ ID NO: 345 - DNA, 16 bp, synthetic construct
  source 1..16: mol_type = other DNA
nntgtttattttggca

SEQ ID NO: 346 - skipped

SEQ ID NO: 347 - DNA, 12 bp, synthetic construct
  source 1..12: mol_type = other DNA
ntaatkrttssn

SEQ ID NO: 348 - DNA, 10 bp, synthetic construct
  source 1..10: mol_type = other DNA
acatcaaagg

SEQ ID NO: 349-350 - skipped (2 entries)

SEQ ID NO: 351 - DNA, 12 bp, synthetic construct
  source 1..12: mol_type = other DNA
gtgggaaagcct

SEQ ID NO: 352 - DNA, 20 bp, synthetic construct
  source 1..20: mol_type = other DNA
cyccnccycctcccccnccy

SEQ ID NO: 353 - skipped

SEQ ID NO: 354 - DNA, 10 bp, synthetic construct
  source 1..10: mol_type = other DNA
vgctgscavb

SEQ ID NO: 355 - DNA, 15 bp, synthetic construct
  source 1..15: mol_type = other DNA
nngncttcyagccyn

SEQ ID NO: 356 - DNA, 21 bp, synthetic construct
  source 1..21: mol_type = other DNA
nngctgtacctncynnnnnnn

SEQ ID NO: 357 - DNA, 15 bp, synthetic construct
  source 1..15: mol_type = other DNA
ntnagtttcrntttc

SEQ ID NO: 358 - DNA, 15 bp, synthetic construct
  source 1..15: mol_type = other DNA
ytggcnnnntgccaa

SEQ ID NO: 359 - skipped

SEQ ID NO: 360 - DNA, 18 bp, synthetic construct
  source 1..18: mol_type = other DNA
wgaaagygaaawcnssnc

SEQ ID NO: 361 - DNA, 14 bp, synthetic construct
  source 1..14: mol_type = other DNA
ctwyytccctccct

SEQ ID NO: 362 - DNA, 12 bp, synthetic construct
  source 1..12: mol_type = other DNA
vvatgacgtcat

SEQ ID NO: 363 - DNA, 17 bp, synthetic construct
  source 1..17: mol_type = other DNA
taatngntstttaatng

SEQ ID NO: 364 - DNA, 15 bp, synthetic construct
  source 1..15: mol_type = other DNA
adggyagyagcatct

SEQ ID NO: 365 - DNA, 19 bp, synthetic construct
  source 1..19: mol_type = other DNA
ncttatctwnnnnnnwcag

SEQ ID NO: 366 - DNA, 21 bp, synthetic construct
  source 1..21: mol_type = other DNA
aaanngaaagtgaaawtrnnn

SEQ ID NO: 367 - DNA, 10 bp, synthetic construct
  source 1..10: mol_type = other DNA
ggtcacgtga

SEQ ID NO: 368 - DNA, 14 bp, synthetic construct
  source 1..14: mol_type = other DNA
aggtcantgacctn

SEQ ID NO: 369 - DNA, 12 bp, synthetic construct
  source 1..12: mol_type = other DNA
ntttccggtaan

SEQ ID NO: 370 - DNA, 24 bp, synthetic construct
  source 1..24: mol_type = other DNA
ccccckccccrwtcwrgccynnnn

SEQ ID NO: 371 - skipped

SEQ ID NO: 372 - DNA, 13 bp, synthetic construct
  source 1..13: mol_type = other DNA
nnccacacccacn

SEQ ID NO: 373 - DNA, 19 bp, synthetic construct
  source 1..19: mol_type = other DNA
cttaatctacrtttaacay

SEQ ID NO: 374 - DNA, 10 bp, synthetic construct
  source 1..10: mol_type = other DNA
rtcacgtgay

SEQ ID NO: 375 - DNA, 12 bp, synthetic construct
  source 1..12: mol_type = other DNA
crccccctcccn

SEQ ID NO: 376 - DNA, 14 bp, synthetic construct
  source 1..14: mol_type = other DNA
acagtccacccctt

SEQ ID NO: 377 - skipped

SEQ ID NO: 378 - DNA, 10 bp, synthetic construct
  source 1..10: mol_type = other DNA
atcacgtgay

SEQ ID NO: 379 - skipped

SEQ ID NO: 380 - DNA, 12 bp, synthetic construct
  source 1..12: mol_type = other DNA
cacagcaggggg

SEQ ID NO: 381 - DNA, 18 bp, synthetic construct
  source 1..18: mol_type = other DNA
agttgagtgactgyrgtt

SEQ ID NO: 382 - DNA, 21 bp, synthetic construct
  source 1..21: mol_type = other DNA
cyccyccycnncctcctccyy

SEQ ID NO: 383 - skipped

SEQ ID NO: 384 - DNA, 15 bp, synthetic construct
  source 1..15: mol_type = other DNA
ccnngccccgccccn

SEQ ID NO: 385 - DNA, 10 bp, synthetic construct
  source 1..10: mol_type = other DNA
aacarctgtt

SEQ ID NO: 386 - DNA, 14 bp, synthetic construct
  source 1..14: mol_type = other DNA
nnsaccgttatnyn

SEQ ID NO: 387 - DNA, 14 bp, synthetic construct
  source 1..14: mol_type = other DNA
ngtmaatattkacn

SEQ ID NO: 388 - DNA, 10 bp, synthetic construct
  source 1..10: mol_type = other DNA
accatctgtt

SEQ ID NO: 389 - DNA, 12 bp, synthetic construct
  source 1..12: mol_type = other DNA
ygccccctgrca

SEQ ID NO: 390 - skipped

SEQ ID NO: 391 - DNA, 25 bp, synthetic construct
  source 1..25: mol_type = other DNA
cctcatggtgycytsytcccttgtg

SEQ ID NO: 392 - DNA, 18 bp, synthetic construct
  source 1..18: mol_type = other DNA
ntccnnncnggcarctgy

SEQ ID NO: 393 - DNA, 20 bp, synthetic construct
  source 1..20: mol_type = other DNA
nnnnnbagatasyatctvhn

SEQ ID NO: 394-395 - skipped (2 entries)

SEQ ID NO: 396 - DNA, 15 bp, synthetic construct
  source 1..15: mol_type = other DNA
ynntgcantttttnn

SEQ ID NO: 397 - DNA, 14 bp, synthetic construct
  source 1..14: mol_type = other DNA
ccgaaaccgaaacy

SEQ ID NO: 398 - DNA, 11 bp, synthetic construct
  source 1..11: mol_type = other DNA
ggtcacgtgrw

SEQ ID NO: 399 - DNA, 10 bp, synthetic construct
  source 1..10: mol_type = other DNA
htttcccawg

SEQ ID NO: 400 - DNA, 21 bp, synthetic construct
  source 1..21: mol_type = other DNA
gccaattycyrtggtgtaaat

SEQ ID NO: 401 - DNA, 12 bp, synthetic construct
  source 1..12: mol_type = other DNA
agtttcaktttc

SEQ ID NO: 402 - skipped

SEQ ID NO: 403 - DNA, 12 bp, synthetic construct
  source 1..12: mol_type = other DNA
rgkgggcgkggc

SEQ ID NO: 404-405 - skipped (2 entries)

SEQ ID NO: 406 - DNA, 12 bp, synthetic construct
  source 1..12: mol_type = other DNA
mkgggygtggcc

SEQ ID NO: 407 - DNA, 10 bp, synthetic construct
  source 1..10: mol_type = other DNA
rtcatgtgac

SEQ ID NO: 408 - DNA, 24 bp, synthetic construct
  source 1..24: mol_type = other DNA
caattccgctcmnnnnnnnnnnnn

SEQ ID NO: 409 - skipped

SEQ ID NO: 410 - DNA, 15 bp, synthetic construct
  source 1..15: mol_type = other DNA
vnaggkcaaaggtca

SEQ ID NO: 411 - skipped

SEQ ID NO: 412 - DNA, 10 bp, synthetic construct
  source 1..10: mol_type = other DNA
aaytaggtca

SEQ ID NO: 413 - skipped

SEQ ID NO: 414 - DNA, 12 bp, synthetic construct
  source 1..12: mol_type = other DNA
gkbcaraggtca

SEQ ID NO: 415 - DNA, 18 bp, synthetic construct
  source 1..18: mol_type = other DNA
rkctagcccnnkcctacc

SEQ ID NO: 416 - DNA, 15 bp, synthetic construct
  source 1..15: mol_type = other DNA
aasctaggtcardnn

SEQ ID NO: 417 - skipped

SEQ ID NO: 418 - DNA, 12 bp, synthetic construct
  source 1..12: mol_type = other DNA
ggtgytgacagw

SEQ ID NO: 419 - DNA, 16 bp, synthetic construct
  source 1..16: mol_type = other DNA
nnnttaattgnttktn

SEQ ID NO: 420 - DNA, 15 bp, synthetic construct
  source 1..15: mol_type = other DNA
accccactcctggtm

SEQ ID NO: 421 - DNA, 14 bp, synthetic construct
  source 1..14: mol_type = other DNA
ncgaaaccgaaacy

SEQ ID NO: 422-423 - skipped (2 entries)

SEQ ID NO: 424 - DNA, 12 bp, synthetic construct
  source 1..12: mol_type = other DNA
nrrtgacgtcat

SEQ ID NO: 425-426 - skipped (2 entries)

SEQ ID NO: 427 - DNA, 11 bp, synthetic construct
  source 1..11: mol_type = other DNA
nrccggaagtg

SEQ ID NO: 428-429 - skipped (2 entries)

SEQ ID NO: 430 - DNA, 10 bp, synthetic construct
  source 1..10: mol_type = other DNA
acatcctggt

SEQ ID NO: 431 - DNA, 10 bp, synthetic construct
  source 1..10: mol_type = other DNA
avcaggaagt

SEQ ID NO: 432 - DNA, 12 bp, synthetic construct
  source 1..12: mol_type = other DNA
tggtacattcca

SEQ ID NO: 433 - skipped

SEQ ID NO: 434 - DNA, 21 bp, synthetic construct
  source 1..21: mol_type = other DNA
nnnynkggyntctnnnncccy

SEQ ID NO: 435 - DNA, 21 bp, synthetic construct
  source 1..21: mol_type = other DNA
astmcagccctakactctccy

SEQ ID NO: 436 - DNA, 20 bp, synthetic construct
  source 1..20: mol_type = other DNA
agatwtndnndwagataawn

SEQ ID NO: 437 - DNA, 14 bp, synthetic construct
  source 1..14: mol_type = other DNA
tgacctttgcccca

SEQ ID NO: 438 - DNA, 12 bp, synthetic construct
  source 1..12: mol_type = other DNA
gctatttttagc

SEQ ID NO: 439 - DNA, 10 bp, synthetic construct
  source 1..10: mol_type = other DNA
aaccggaagt

SEQ ID NO: 440-442 - skipped (3 entries)

SEQ ID NO: 443 - DNA, 15 bp, synthetic construct
  source 1..15: mol_type = other DNA
mmccacgcacccmty

SEQ ID NO: 444 - DNA, 21 bp, synthetic construct
  source 1..21: mol_type = other DNA
gctwttccnncnnccncccnn

SEQ ID NO: 445 - DNA, 10 bp, synthetic construct
  source 1..10: mol_type = other DNA
accggaagtr

SEQ ID NO: 446 - DNA, 11 bp, synthetic construct
  source 1..11: mol_type = other DNA
aaccggaaatr

SEQ ID NO: 447 - DNA, 12 bp, synthetic construct
  source 1..12: mol_type = other DNA
nccacgcccmcn

SEQ ID NO: 448 - skipped

SEQ ID NO: 449 - DNA, 10 bp, synthetic construct
  source 1..10: mol_type = other DNA
acvaggaagt

SEQ ID NO: 450 - DNA, 20 bp, synthetic construct
  source 1..20: mol_type = other DNA
gaatggaaaaaatgagtcat

SEQ ID NO: 451 - skipped

SEQ ID NO: 452 - DNA, 17 bp, synthetic construct
  source 1..17: mol_type = other DNA
gggraarrgrmcagmtg

SEQ ID NO: 453 - DNA, 12 bp, synthetic construct
  source 1..12: mol_type = other DNA
rccacgcccmcy

SEQ ID NO: 454 - DNA, 10 bp, synthetic construct
  source 1..10: mol_type = other DNA
gccatctgtt

SEQ ID NO: 455 - DNA, 21 bp, synthetic construct
  source 1..21: mol_type = other DNA
nnngnncnwnggcttcyagcc

SEQ ID NO: 456 - skipped

SEQ ID NO: 457 - DNA, 12 bp, synthetic construct
  source 1..12: mol_type = other DNA
aggtghcagaca

SEQ ID NO: 458 - DNA, 12 bp, synthetic construct
  source 1..12: mol_type = other DNA
gtgaccttgrvn

SEQ ID NO: 459 - DNA, 12 bp, synthetic construct
  source 1..12: mol_type = other DNA
gctgawtcagca

SEQ ID NO: 460 - DNA, 24 bp, synthetic construct
  source 1..24: mol_type = other DNA
trtaytgcsnnccytnccangscm

SEQ ID NO: 461 - DNA, 12 bp, synthetic construct
  source 1..12: mol_type = other DNA
wcctwaggwcas

SEQ ID NO: 462 - DNA, 18 bp, synthetic construct
  source 1..18: mol_type = other DNA
sacatgnssssncatgts

SEQ ID NO: 463 - DNA, 14 bp, synthetic construct
  source 1..14: mol_type = other DNA
nagtttcrttttcy

SEQ ID NO: 464 - DNA, 12 bp, synthetic construct
  source 1..12: mol_type = other DNA
graawtgaaawt

SEQ ID NO: 465 - DNA, 10 bp, synthetic construct
  source 1..10: mol_type = other DNA
attttccatt

SEQ ID NO: 466 - DNA, 12 bp, synthetic construct
  source 1..12: mol_type = other DNA
ggaagtgaaawt

SEQ ID NO: 467 - DNA, 10 bp, synthetic construct
  source 1..10: mol_type = other DNA
aacaggaagt

SEQ ID NO: 468 - DNA, 12 bp, synthetic construct
  source 1..12: mol_type = other DNA
ggtcaaaggtca

SEQ ID NO: 469 - DNA, 11 bp, synthetic construct
  source 1..11: mol_type = other DNA
nccacgcccmc

SEQ ID NO: 470 - skipped

SEQ ID NO: 471 - DNA, 21 bp, synthetic construct
  source 1..21: mol_type = other DNA
agaattagtgaactggaagat

SEQ ID NO: 472 - DNA, 12 bp, synthetic construct
  source 1..12: mol_type = other DNA
saabtaggtcav

SEQ ID NO: 473 - DNA, 12 bp, synthetic construct
  source 1..12: mol_type = other DNA
agtttcagtttc

SEQ ID NO: 474 - skipped

SEQ ID NO: 475 - DNA, 14 bp, synthetic construct
  source 1..14: mol_type = other DNA
ctggcaggctgcca

SEQ ID NO: 476 - skipped

SEQ ID NO: 477 - DNA, 14 bp, synthetic construct
  source 1..14: mol_type = other DNA
ncgaaarygaaant

SEQ ID NO: 478 - DNA, 10 bp, synthetic construct
  source 1..10: mol_type = other DNA
acttcckgkt

SEQ ID NO: 479 - DNA, 10 bp, synthetic construct
  source 1..10: mol_type = other DNA
hacttccggy

SEQ ID NO: 480 - DNA, 10 bp, synthetic construct
  source 1..10: mol_type = other DNA
ggaaattccc

SEQ ID NO: 481 - DNA, 15 bp, synthetic construct
  source 1..15: mol_type = other DNA
aacgaaaccgaaact

SEQ ID NO: 482 - DNA, 12 bp, synthetic construct
  source 1..12: mol_type = other DNA
gaaawygaaawy

SEQ ID NO: 483 - DNA, 10 bp, synthetic construct
  source 1..10: mol_type = other DNA
gtgaccttga

SEQ ID NO: 484 - DNA, 10 bp, synthetic construct
  source 1..10: mol_type = other DNA
aacaggaaat

SEQ ID NO: 485 - DNA, 10 bp, synthetic construct
  source 1..10: mol_type = other DNA
aaaccacaaa

SEQ ID NO: 486 - skipped

SEQ ID NO: 487 - DNA, 10 bp, synthetic construct
  source 1..10: mol_type = other DNA
accggaagtg

SEQ ID NO: 488 - DNA, 12 bp, synthetic construct
  source 1..12: mol_type = other DNA
aggggatttccc

SEQ ID NO: 489 - DNA, 12 bp, synthetic construct
  source 1..12: mol_type = other DNA
gaaagtgaaagt

SEQ ID NO: 490 - DNA, 11 bp, synthetic construct
  source 1..11: mol_type = other DNA
gmcacgccccc

SEQ ID NO: 491 - DNA, 16 bp, synthetic construct
  source 1..16: mol_type = other DNA
nnmcgcccacgcannn

SEQ ID NO: 492 - DNA, 14 bp, synthetic construct
  source 1..14: mol_type = other DNA
ngggrmtttccmnn

SEQ ID NO: 493 - DNA, 10 bp, synthetic construct
  source 1..10: mol_type = other DNA
caaaccacag

SEQ ID NO: 494-498 - skipped (5 entries)

SEQ ID NO: 499 - DNA, 10 bp, synthetic construct
  source 1..10: mol_type = other DNA
acaggaagtg

SEQ ID NO: 500 - skipped

SEQ ID NO: 501 - DNA, 10 bp, synthetic construct
  source 1..10: mol_type = other DNA
agaggaagtg

SEQ ID NO: 502 - DNA, 20 bp, synthetic construct
  source 1..20: mol_type = other DNA
nnnnnnnnccgcccmcgcnn

SEQ ID NO: 503 - DNA, 10 bp, synthetic construct
  source 1..10: mol_type = other DNA
gctgtggttt

SEQ ID NO: 504 - DNA, 12 bp, synthetic construct
  source 1..12: mol_type = other DNA
mctcccmcrcab

SEQ ID NO: 505 - skipped

SEQ ID NO: 506 - DNA, 12 bp, synthetic construct
  source 1..12: mol_type = other DNA
ngcgtgggcggr

SEQ ID NO: 507 - skipped

SEQ ID NO: 508 - DNA, 10 bp, synthetic construct
  source 1..10: mol_type = other DNA
tgcgtgggyg

SEQ ID NO: 509 - DNA, 12 bp, synthetic construct
  source 1..12: mol_type = other DNA
tgacctttncnt

SEQ ID NO: 510 - DNA, 10 bp, synthetic construct
  source 1..10: mol_type = other DNA
aatgagtcat

SEQ ID NO: 511 - DNA, 10 bp, synthetic construct
  source 1..10: mol_type = other DNA
atgactcatt

SEQ ID NO: 512 - DNA, 10 bp, synthetic construct
  source 1..10: mol_type = other DNA
aatgactcat

SEQ ID NO: 513 - DNA, 10 bp, synthetic construct
  source 1..10: mol_type = other DNA
atgagtcatt

SEQ ID NO: 514 - DNA, 10 bp, synthetic construct
  source 1..10: mol_type = other DNA
gatgagtcat

SEQ ID NO: 515 - DNA, 10 bp, synthetic construct
  source 1..10: mol_type = other DNA
atgactcatc

SEQ ID NO: 516 - DNA, 10 bp, synthetic construct
  source 1..10: mol_type = other DNA
gatgactcat

SEQ ID NO: 517 - DNA, 10 bp, synthetic construct
  source 1..10: mol_type = other DNA
atgagtcatc

SEQ ID NO: 518 - DNA, 17 bp, synthetic construct
  source 1..17: mol_type = other DNA
tgagtcataggtaaatt

SEQ ID NO: 519 - DNA, 17 bp, synthetic construct
  source 1..17: mol_type = other DNA
aatttacctatgactca

SEQ ID NO: 520 - DNA, 17 bp, synthetic construct
  source 1..17: mol_type = other DNA
tgagtcataggtagatt

SEQ ID NO: 521 - DNA, 17 bp, synthetic construct
  source 1..17: mol_type = other DNA
aatctacctatgactca

SEQ ID NO: 522 - DNA, 17 bp, synthetic construct
  source 1..17: mol_type = other DNA
tgagtcataggtgaatt

SEQ ID NO: 523 - DNA, 17 bp, synthetic construct
  source 1..17: mol_type = other DNA
aattcacctatgactca

SEQ ID NO: 524 - DNA, 17 bp, synthetic construct
  source 1..17: mol_type = other DNA
tgagtcataggtggatt

SEQ ID NO: 525 - DNA, 17 bp, synthetic construct
  source 1..17: mol_type = other DNA
aatccacctatgactca

SEQ ID NO: 526 - DNA, 17 bp, synthetic construct
  source 1..17: mol_type = other DNA
tgagtcattggtaaatt

SEQ ID NO: 527 - DNA, 17 bp, synthetic construct
  source 1..17: mol_type = other DNA
aatttaccaatgactca

SEQ ID NO: 528 - DNA, 17 bp, synthetic construct
  source 1..17: mol_type = other DNA
tgagtcattggtagatt

SEQ ID NO: 529 - DNA, 17 bp, synthetic construct
  source 1..17: mol_type = other DNA
aatctaccaatgactca

SEQ ID NO: 530 - DNA, 17 bp, synthetic construct
  source 1..17: mol_type = other DNA
tgagtcattggtgaatt

SEQ ID NO: 531 - DNA, 17 bp, synthetic construct
  source 1..17: mol_type = other DNA
aattcaccaatgactca

SEQ ID NO: 532 - DNA, 17 bp, synthetic construct
  source 1..17: mol_type = other DNA
tgagtcattggtggatt

SEQ ID NO: 533 - DNA, 17 bp, synthetic construct
  source 1..17: mol_type = other DNA
aatccaccaatgactca

SEQ ID NO: 534 - DNA, 17 bp, synthetic construct
  source 1..17: mol_type = other DNA
tgactcataggtaaatt

SEQ ID NO: 535 - DNA, 17 bp, synthetic construct
  source 1..17: mol_type = other DNA
aatttacctatgagtca

SEQ ID NO: 536 - DNA, 17 bp, synthetic construct
  source 1..17: mol_type = other DNA
tgactcataggtagatt

SEQ ID NO: 537 - DNA, 17 bp, synthetic construct
  source 1..17: mol_type = other DNA
aatctacctatgagtca

SEQ ID NO: 538 - DNA, 17 bp, synthetic construct
  source 1..17: mol_type = other DNA
tgactcataggtgaatt

SEQ ID NO: 539 - DNA, 17 bp, synthetic construct
  source 1..17: mol_type = other DNA
aattcacctatgagtca

SEQ ID NO: 540 - DNA, 17 bp, synthetic construct
  source 1..17: mol_type = other DNA
tgactcataggtggatt

SEQ ID NO: 541 - DNA, 17 bp, synthetic construct
  source 1..17: mol_type = other DNA
aatccacctatgagtca

SEQ ID NO: 542 - DNA, 17 bp, synthetic construct
  source 1..17: mol_type = other DNA
tgactcattggtaaatt

SEQ ID NO: 543 - DNA, 17 bp, synthetic construct
  source 1..17: mol_type = other DNA
aatttaccaatgagtca

SEQ ID NO: 544 - DNA, 17 bp, synthetic construct
  source 1..17: mol_type = other DNA
tgactcattggtagatt

SEQ ID NO: 545 - DNA, 17 bp, synthetic construct
  source 1..17: mol_type = other DNA
aatctaccaatgagtca

SEQ ID NO: 546 - DNA, 17 bp, synthetic construct
  source 1..17: mol_type = other DNA
tgactcattggtgaatt

SEQ ID NO: 547 - DNA, 17 bp, synthetic construct
  source 1..17: mol_type = other DNA
aattcaccaatgagtca

SEQ ID NO: 548 - DNA, 17 bp, synthetic construct
  source 1..17: mol_type = other DNA
tgactcattggtggatt

SEQ ID NO: 549 - DNA, 17 bp, synthetic construct
  source 1..17: mol_type = other DNA
aatccaccaatgagtca

SEQ ID NO: 550 - DNA, 15 bp, synthetic construct
  source 1..15: mol_type = other DNA
tgagtcatatccaaa

SEQ ID NO: 551 - DNA, 15 bp, synthetic construct
  source 1..15: mol_type = other DNA
tttggatatgactca

SEQ ID NO: 552 - DNA, 15 bp, synthetic construct
  source 1..15: mol_type = other DNA
tgagtcatatccaga

SEQ ID NO: 553 - DNA, 15 bp, synthetic construct
  source 1..15: mol_type = other DNA
tctggatatgactca

SEQ ID NO: 554 - DNA, 15 bp, synthetic construct
  source 1..15: mol_type = other DNA
tgagtcatatccgaa

SEQ ID NO: 555 - DNA, 15 bp, synthetic construct
  source 1..15: mol_type = other DNA
ttcggatatgactca

SEQ ID NO: 556 - DNA, 15 bp, synthetic construct
  source 1..15: mol_type = other DNA
tgagtcatatccgga

SEQ ID NO: 557 - DNA, 15 bp, synthetic construct
  source 1..15: mol_type = other DNA
tccggatatgactca

SEQ ID NO: 558 - DNA, 15 bp, synthetic construct
  source 1..15: mol_type = other DNA
tgagtcatattcaaa

SEQ ID NO: 559 - DNA, 15 bp, synthetic construct
  source 1..15: mol_type = other DNA
tttgaatatgactca

SEQ ID NO: 560 - DNA, 15 bp, synthetic construct
  source 1..15: mol_type = other DNA
tgagtcatattcaga

SEQ ID NO: 561 - DNA, 15 bp, synthetic construct
  source 1..15: mol_type = other DNA
tctgaatatgactca

SEQ ID NO: 562 - DNA, 15 bp, synthetic construct
  source 1..15: mol_type = other DNA
tgagtcatattcgaa

SEQ ID NO: 563 - DNA, 15 bp, synthetic construct
  source 1..15: mol_type = other DNA
ttcgaatatgactca

SEQ ID NO: 564 - DNA, 15 bp, synthetic construct
  source 1..15: mol_type = other DNA
tgagtcatattcgga

SEQ ID NO: 565 - DNA, 15 bp, synthetic construct
  source 1..15: mol_type = other DNA
tccgaatatgactca

SEQ ID NO: 566 - DNA, 15 bp, synthetic construct
  source 1..15: mol_type = other DNA
tgagtcatttccaaa

SEQ ID NO: 567 - DNA, 15 bp, synthetic construct
  source 1..15: mol_type = other DNA
tttggaaatgactca

SEQ ID NO: 568 - DNA, 15 bp, synthetic construct
  source 1..15: mol_type = other DNA
tgagtcatttccaga

SEQ ID NO: 569 - DNA, 15 bp, synthetic construct
  source 1..15: mol_type = other DNA
tctggaaatgactca

SEQ ID NO: 570 - DNA, 15 bp, synthetic construct
  source 1..15: mol_type = other DNA
tgagtcatttccgaa

SEQ ID NO: 571 - DNA, 15 bp, synthetic construct
  source 1..15: mol_type = other DNA
ttcggaaatgactca

SEQ ID NO: 572 - DNA, 15 bp, synthetic construct
  source 1..15: mol_type = other DNA
tgagtcatttccgga

SEQ ID NO: 573 - DNA, 15 bp, synthetic construct
  source 1..15: mol_type = other DNA
tccggaaatgactca

SEQ ID NO: 574 - DNA, 15 bp, synthetic construct
  source 1..15: mol_type = other DNA
tgagtcattttcaaa

SEQ ID NO: 575 - DNA, 15 bp, synthetic construct
  source 1..15: mol_type = other DNA
tttgaaaatgactca

SEQ ID NO: 576 - DNA, 15 bp, synthetic construct
  source 1..15: mol_type = other DNA
tgagtcattttcaga

SEQ ID NO: 577 - DNA, 15 bp, synthetic construct
  source 1..15: mol_type = other DNA
tctgaaaatgactca

SEQ ID NO: 578 - DNA, 15 bp, synthetic construct
  source 1..15: mol_type = other DNA
tgagtcattttcgaa

SEQ ID NO: 579 - DNA, 15 bp, synthetic construct
  source 1..15: mol_type = other DNA
ttcgaaaatgactca

SEQ ID NO: 580 - DNA, 15 bp, synthetic construct
  source 1..15: mol_type = other DNA
tgagtcattttcgga

SEQ ID NO: 581 - DNA, 15 bp, synthetic construct
  source 1..15: mol_type = other DNA
tccgaaaatgactca

SEQ ID NO: 582 - DNA, 15 bp, synthetic construct
  source 1..15: mol_type = other DNA
tgactcatatccaaa

SEQ ID NO: 583 - DNA, 15 bp, synthetic construct
  source 1..15: mol_type = other DNA
tttggatatgagtca

SEQ ID NO: 584 - DNA, 15 bp, synthetic construct
  source 1..15: mol_type = other DNA
tgactcatatccaga

SEQ ID NO: 585 - DNA, 15 bp, synthetic construct
  source 1..15: mol_type = other DNA
tctggatatgagtca

SEQ ID NO: 586 - DNA, 15 bp, synthetic construct
  source 1..15: mol_type = other DNA
tgactcatatccgaa

SEQ ID NO: 587 - DNA, 15 bp, synthetic construct
  source 1..15: mol_type = other DNA
ttcggatatgagtca

SEQ ID NO: 588 - DNA, 15 bp, synthetic construct
  source 1..15: mol_type = other DNA
tgactcatatccgga

SEQ ID NO: 589 - DNA, 15 bp, synthetic construct
  source 1..15: mol_type = other DNA
tccggatatgagtca

SEQ ID NO: 590 - DNA, 15 bp, synthetic construct
  source 1..15: mol_type = other DNA
tgactcatattcaaa

SEQ ID NO: 591 - DNA, 15 bp, synthetic construct
  source 1..15: mol_type = other DNA
tttgaatatgagtca

SEQ ID NO: 592 - DNA, 15 bp, synthetic construct
  source 1..15: mol_type = other DNA
tgactcatattcaga

SEQ ID NO: 593 - DNA, 15 bp, synthetic construct
  source 1..15: mol_type = other DNA
tctgaatatgagtca

SEQ ID NO: 594 - DNA, 15 bp, synthetic construct
  source 1..15: mol_type = other DNA
tgactcatattcgaa

SEQ ID NO: 595 - DNA, 15 bp, synthetic construct
  source 1..15: mol_type = other DNA
ttcgaatatgagtca

SEQ ID NO: 596 - DNA, 15 bp, synthetic construct
  source 1..15: mol_type = other DNA
tgactcatattcgga

SEQ ID NO: 597 - DNA, 15 bp, synthetic construct
  source 1..15: mol_type = other DNA
tccgaatatgagtca

SEQ ID NO: 598 - DNA, 15 bp, synthetic construct
  source 1..15: mol_type = other DNA
tgactcatttccaaa

SEQ ID NO: 599 - DNA, 15 bp, synthetic construct
  source 1..15: mol_type = other DNA
tttggaaatgagtca

SEQ ID NO: 600 - DNA, 15 bp, synthetic construct
  source 1..15: mol_type = other DNA
tgactcatttccaga

SEQ ID NO: 601 - DNA, 15 bp, synthetic construct
  source 1..15: mol_type = other DNA
tctggaaatgagtca

SEQ ID NO: 602 - DNA, 15 bp, synthetic construct
  source 1..15: mol_type = other DNA
tgactcatttccgaa

SEQ ID NO: 603 - DNA, 15 bp, synthetic construct
  source 1..15: mol_type = other DNA
ttcggaaatgagtca

SEQ ID NO: 604 - DNA, 15 bp, synthetic construct
  source 1..15: mol_type = other DNA
tgactcatttccgga

SEQ ID NO: 605 - DNA, 15 bp, synthetic construct
  source 1..15: mol_type = other DNA
tccggaaatgagtca

SEQ ID NO: 606 - DNA, 15 bp, synthetic construct
  source 1..15: mol_type = other DNA
tgactcattttcaaa

SEQ ID NO: 607 - DNA, 15 bp, synthetic construct
  source 1..15: mol_type = other DNA
tttgaaaatgagtca

SEQ ID NO: 608 - DNA, 15 bp, synthetic construct
  source 1..15: mol_type = other DNA
tgactcattttcaga

SEQ ID NO: 609 - DNA, 15 bp, synthetic construct
  source 1..15: mol_type = other DNA
tctgaaaatgagtca

SEQ ID NO: 610 - DNA, 15 bp, synthetic construct
  source 1..15: mol_type = other DNA
tgactcattttcgaa

SEQ ID NO: 611 - DNA, 15 bp, synthetic construct
  source 1..15: mol_type = other DNA
ttcgaaaatgagtca

SEQ ID NO: 612 - DNA, 15 bp, synthetic construct
  source 1..15: mol_type = other DNA
tgactcattttcgga

SEQ ID NO: 613 - DNA, 15 bp, synthetic construct
  source 1..15: mol_type = other DNA
tccgaaaatgagtca

SEQ ID NO: 614 - DNA, 10 bp, synthetic construct
  source 1..10: mol_type = other DNA
gatgagtcac

SEQ ID NO: 615 - DNA, 10 bp, synthetic construct
  source 1..10: mol_type = other DNA
gtgactcatc

SEQ ID NO: 616 - DNA, 10 bp, synthetic construct
  source 1..10: mol_type = other DNA
gatgagtcat

SEQ ID NO: 617 - DNA, 10 bp, synthetic construct
  source 1..10: mol_type = other DNA
atgactcatc

SEQ ID NO: 618 - DNA, 10 bp, synthetic construct
  source 1..10: mol_type = other DNA
gatgactcac

SEQ ID NO: 619 - DNA, 10 bp, synthetic construct
  source 1..10: mol_type = other DNA
gtgagtcatc

SEQ ID NO: 620 - DNA, 10 bp, synthetic construct
  source 1..10: mol_type = other DNA
gatgactcat

SEQ ID NO: 621 - DNA, 10 bp, synthetic construct
  source 1..10: mol_type = other DNA
atgagtcatc

SEQ ID NO: 622 - DNA, 10 bp, synthetic construct
  source 1..10: mol_type = other DNA
aatgagtcat

SEQ ID NO: 623 - DNA, 10 bp, synthetic construct
  source 1..10: mol_type = other DNA
atgactcatt

SEQ ID NO: 624 - DNA, 10 bp, synthetic construct
  source 1..10: mol_type = other DNA
aatgactcat

SEQ ID NO: 625 - DNA, 10 bp, synthetic construct
  source 1..10: mol_type = other DNA
atgagtcatt

SEQ ID NO: 626 - DNA, 10 bp, synthetic construct
  source 1..10: mol_type = other DNA
gatgagtcat

SEQ ID NO: 627 - DNA, 10 bp, synthetic construct
  source 1..10: mol_type = other DNA
atgactcatc

SEQ ID NO: 628 - DNA, 10 bp, synthetic construct
  source 1..10: mol_type = other DNA
gatgactcat

SEQ ID NO: 629 - DNA, 10 bp, synthetic construct
  source 1..10: mol_type = other DNA
atgagtcatc

SEQ ID NO: 630 - DNA, 10 bp, synthetic construct
  source 1..10: mol_type = other DNA
tatgagtcat

SEQ ID NO: 631 - DNA, 10 bp, synthetic construct
  source 1..10: mol_type = other DNA
atgactcata

SEQ ID NO: 632 - DNA, 10 bp, synthetic construct
  source 1..10: mol_type = other DNA
tatgactcat

SEQ ID NO: 633 - DNA, 10 bp, synthetic construct
  source 1..10: mol_type = other DNA
atgagtcata

SEQ ID NO: 634 - DNA, 11 bp, synthetic construct
  source 1..11: mol_type = other DNA
aatgagtcata

SEQ ID NO: 635 - DNA, 11 bp, synthetic construct
  source 1..11: mol_type = other DNA
tatgactcatt

SEQ ID NO: 636 - DNA, 11 bp, synthetic construct
  source 1..11: mol_type = other DNA
aatgagtcatc

SEQ ID NO: 637 - DNA, 11 bp, synthetic construct
  source 1..11: mol_type = other DNA
gatgactcatt

SEQ ID NO: 638 - DNA, 11 bp, synthetic construct
  source 1..11: mol_type = other DNA
aatgagtcatt

SEQ ID NO: 639 - DNA, 11 bp, synthetic construct
  source 1..11: mol_type = other DNA
aatgactcatt

SEQ ID NO: 640 - DNA, 11 bp, synthetic construct
  source 1..11: mol_type = other DNA
aatgactcata

SEQ ID NO: 641 - DNA, 11 bp, synthetic construct
  source 1..11: mol_type = other DNA
tatgagtcatt

SEQ ID NO: 642 - DNA, 11 bp, synthetic construct
  source 1..11: mol_type = other DNA
aatgactcatc

SEQ ID NO: 643 - DNA, 11 bp, synthetic construct
  source 1..11: mol_type = other DNA
gatgagtcatt

SEQ ID NO: 644 - DNA, 11 bp, synthetic construct
  source 1..11: mol_type = other DNA
aatgactcatt

SEQ ID NO: 645 - DNA, 11 bp, synthetic construct
  source 1..11: mol_type = other DNA
aatgagtcatt

SEQ ID NO: 646 - DNA, 11 bp, synthetic construct
  source 1..11: mol_type = other DNA
gatgagtcata

SEQ ID NO: 647 - DNA, 11 bp, synthetic construct
  source 1..11: mol_type = other DNA
tatgactcatc

SEQ ID NO: 648 - DNA, 11 bp, synthetic construct
  source 1..11: mol_type = other DNA
gatgagtcatc

SEQ ID NO: 649 - DNA, 11 bp, synthetic construct
  source 1..11: mol_type = other DNA
gatgactcatc

SEQ ID NO: 650 - DNA, 11 bp, synthetic construct
  source 1..11: mol_type = other DNA
gatgagtcatt

SEQ ID NO: 651 - DNA, 11 bp, synthetic construct
  source 1..11: mol_type = other DNA
aatgactcatc

SEQ ID NO: 652 - DNA, 11 bp, synthetic construct
  source 1..11: mol_type = other DNA
gatgactcata

SEQ ID NO: 653 - DNA, 11 bp, synthetic construct
  source 1..11: mol_type = other DNA
tatgagtcatc

SEQ ID NO: 654 - DNA, 11 bp, synthetic construct
  source 1..11: mol_type = other DNA
gatgactcatc

SEQ ID NO: 655 - DNA, 11 bp, synthetic construct
  source 1..11: mol_type = other DNA
gatgagtcatc

SEQ ID NO: 656 - DNA, 11 bp, synthetic construct
  source 1..11: mol_type = other DNA
gatgactcatt

SEQ ID NO: 657 - DNA, 11 bp, synthetic construct
  source 1..11: mol_type = other DNA
aatgagtcatc

SEQ ID NO: 658 - DNA, 11 bp, synthetic construct
  source 1..11: mol_type = other DNA
tatgagtcata

SEQ ID NO: 659 - DNA, 11 bp, synthetic construct
  source 1..11: mol_type = other DNA
tatgactcata

SEQ ID NO: 660 - DNA, 11 bp, synthetic construct
  source 1..11: mol_type = other DNA
tatgagtcatc

SEQ ID NO: 661 - DNA, 11 bp, synthetic construct
  source 1..11: mol_type = other DNA
gatgactcata

SEQ ID NO: 662 - DNA, 11 bp, synthetic construct
  source 1..11: mol_type = other DNA
tatgagtcatt

SEQ ID NO: 663 - DNA, 11 bp, synthetic construct
  source 1..11: mol_type = other DNA
aatgactcata

SEQ ID NO: 664 - DNA, 11 bp, synthetic construct
  source 1..11: mol_type = other DNA
tatgactcata

SEQ ID NO: 665 - DNA, 11 bp, synthetic construct
  source 1..11: mol_type = other DNA
tatgagtcata

SEQ ID NO: 666 - DNA, 11 bp, synthetic construct
  source 1..11: mol_type = other DNA
tatgactcatc

SEQ ID NO: 667 - DNA, 11 bp, synthetic construct
  source 1..11: mol_type = other DNA
gatgagtcata

SEQ ID NO: 668 - DNA, 11 bp, synthetic construct
  source 1..11: mol_type = other DNA
tatgactcatt

SEQ ID NO: 669 - DNA, 11 bp, synthetic construct
  source 1..11: mol_type = other DNA
aatgagtcata

SEQ ID NO: 670-681 - skipped (12 entries)

SEQ ID NO: 682 - DNA, 12 bp, synthetic construct
  source 1..12: mol_type = other DNA
ggatgactcatc

SEQ ID NO: 683 - DNA, 12 bp, synthetic construct
  source 1..12: mol_type = other DNA
gatgagtcatcc

SEQ ID NO: 684 - DNA, 15 bp, synthetic construct
  source 1..15: mol_type = other DNA
agacgaattgacaga

SEQ ID NO: 685 - DNA, 15 bp, synthetic construct
  source 1..15: mol_type = other DNA
tctgtcaattcgtct

SEQ ID NO: 686 - DNA, 15 bp, synthetic construct
  source 1..15: mol_type = other DNA
agacgaattgacagt

SEQ ID NO: 687 - DNA, 15 bp, synthetic construct
  source 1..15: mol_type = other DNA
actgtcaattcgtct

SEQ ID NO: 688 - DNA, 15 bp, synthetic construct
  source 1..15: mol_type = other DNA
agacgaattgacaca

SEQ ID NO: 689 - DNA, 15 bp, synthetic construct
  source 1..15: mol_type = other DNA
tgtgtcaattcgtct

SEQ ID NO: 690 - DNA, 15 bp, synthetic construct
  source 1..15: mol_type = other DNA
agacgaattgacact

SEQ ID NO: 691 - DNA, 15 bp, synthetic construct
  source 1..15: mol_type = other DNA
agtgtcaattcgtct

SEQ ID NO: 692 - DNA, 15 bp, synthetic construct
  source 1..15: mol_type = other DNA
agacgaattgactga

SEQ ID NO: 693 - DNA, 15 bp, synthetic construct
  source 1..15: mol_type = other DNA
tcagtcaattcgtct

SEQ ID NO: 694 - DNA, 15 bp, synthetic construct
  source 1..15: mol_type = other DNA
agacgaattgactgt

SEQ ID NO: 695 - DNA, 15 bp, synthetic construct
  source 1..15: mol_type = other DNA
acagtcaattcgtct

SEQ ID NO: 696 - DNA, 15 bp, synthetic construct
  source 1..15: mol_type = other DNA
agacgaattgactca

SEQ ID NO: 697 - DNA, 15 bp, synthetic construct
  source 1..15: mol_type = other DNA
tgagtcaattcgtct

SEQ ID NO: 698 - DNA, 15 bp, synthetic construct
  source 1..15: mol_type = other DNA
agacgaattgactct

SEQ ID NO: 699 - DNA, 15 bp, synthetic construct
  source 1..15: mol_type = other DNA
agagtcaattcgtct

SEQ ID NO: 700 - DNA, 15 bp, synthetic construct
  source 1..15: mol_type = other DNA
tgacgaattgacaga

SEQ ID NO: 701 - DNA, 15 bp, synthetic construct
  source 1..15: mol_type = other DNA
tctgtcaattcgtca

SEQ ID NO: 702 - DNA, 15 bp, synthetic construct
  source 1..15: mol_type = other DNA
tgacgaattgacagt

SEQ ID NO: 703 - DNA, 15 bp, synthetic construct
  source 1..15: mol_type = other DNA
actgtcaattcgtca

SEQ ID NO: 704 - DNA, 15 bp, synthetic construct
  source 1..15: mol_type = other DNA
tgacgaattgacaca

SEQ ID NO: 705 - DNA, 15 bp, synthetic construct
  source 1..15: mol_type = other DNA
tgtgtcaattcgtca

SEQ ID NO: 706 - DNA, 15 bp, synthetic construct
  source 1..15: mol_type = other DNA
tgacgaattgacact

SEQ ID NO: 707 - DNA, 15 bp, synthetic construct
  source 1..15: mol_type = other DNA
agtgtcaattcgtca

SEQ ID NO: 708 - DNA, 15 bp, synthetic construct
  source 1..15: mol_type = other DNA
tgacgaattgactga

SEQ ID NO: 709 - DNA, 15 bp, synthetic construct
  source 1..15: mol_type = other DNA
tcagtcaattcgtca

SEQ ID NO: 710 - DNA, 15 bp, synthetic construct
  source 1..15: mol_type = other DNA
tgacgaattgactgt

SEQ ID NO: 711 - DNA, 15 bp, synthetic construct
  source 1..15: mol_type = other DNA
acagtcaattcgtca

SEQ ID NO: 712 - DNA, 15 bp, synthetic construct
  source 1..15: mol_type = other DNA
tgacgaattgactca

SEQ ID NO: 713 - DNA, 15 bp, synthetic construct
  source 1..15: mol_type = other DNA
tgagtcaattcgtca

SEQ ID NO: 714 - DNA, 15 bp, synthetic construct
  source 1..15: mol_type = other DNA
tgacgaattgactct

SEQ ID NO: 715 - DNA, 15 bp, synthetic construct
  source 1..15: mol_type = other DNA
agagtcaattcgtca

SEQ ID NO: 716-727 - skipped (12 entries)

SEQ ID NO: 728 - DNA, 10 bp, synthetic construct
  source 1..10: mol_type = other DNA
aatgagtcac

SEQ ID NO: 729 - DNA, 10 bp, synthetic construct
  source 1..10: mol_type = other DNA
gtgactcatt

SEQ ID NO: 730 - DNA, 10 bp, synthetic construct
  source 1..10: mol_type = other DNA
aatgagtcat

SEQ ID NO: 731 - DNA, 10 bp, synthetic construct
  source 1..10: mol_type = other DNA
atgactcatt

SEQ ID NO: 732 - DNA, 10 bp, synthetic construct
  source 1..10: mol_type = other DNA
aatgactcac

SEQ ID NO: 733 - DNA, 10 bp, synthetic construct
  source 1..10: mol_type = other DNA
gtgagtcatt

SEQ ID NO: 734 - DNA, 10 bp, synthetic construct
  source 1..10: mol_type = other DNA
aatgactcat

SEQ ID NO: 735 - DNA, 10 bp, synthetic construct
  source 1..10: mol_type = other DNA
atgagtcatt

SEQ ID NO: 736 - DNA, 10 bp, synthetic construct
  source 1..10: mol_type = other DNA
gatgagtcac

SEQ ID NO: 737 - DNA, 10 bp, synthetic construct
  source 1..10: mol_type = other DNA
gtgactcatc

SEQ ID NO: 738 - DNA, 10 bp, synthetic construct
  source 1..10: mol_type = other DNA
gatgagtcat

SEQ ID NO: 739 - DNA, 10 bp, synthetic construct
  source 1..10: mol_type = other DNA
atgactcatc

SEQ ID NO: 740 - DNA, 10 bp, synthetic construct
  source 1..10: mol_type = other DNA
gatgactcac

SEQ ID NO: 741 - DNA, 10 bp, synthetic construct
  source 1..10: mol_type = other DNA
gtgagtcatc

SEQ ID NO: 742 - DNA, 10 bp, synthetic construct
  source 1..10: mol_type = other DNA
gatgactcat

SEQ ID NO: 743 - DNA, 10 bp, synthetic construct
  source 1..10: mol_type = other DNA
atgagtcatc

SEQ ID NO: 744 - DNA, 10 bp, synthetic construct
  source 1..10: mol_type = other DNA
tatgagtcac

SEQ ID NO: 745 - DNA, 10 bp, synthetic construct
  source 1..10: mol_type = other DNA
gtgactcata

SEQ ID NO: 746 - DNA, 10 bp, synthetic construct
  source 1..10: mol_type = other DNA
tatgagtcat

SEQ ID NO: 747 - DNA, 10 bp, synthetic construct
  source 1..10: mol_type = other DNA
atgactcata

SEQ ID NO: 748 - DNA, 10 bp, synthetic construct
  source 1..10: mol_type = other DNA
tatgactcac

SEQ ID NO: 749 - DNA, 10 bp, synthetic construct
  source 1..10: mol_type = other DNA
gtgagtcata

SEQ ID NO: 750 - DNA, 10 bp, synthetic construct
  source 1..10: mol_type = other DNA
tatgactcat

SEQ ID NO: 751 - DNA, 10 bp, synthetic construct
  source 1..10: mol_type = other DNA
atgagtcata

SEQ ID NO: 752 - DNA, 15 bp, synthetic construct
  source 1..15: mol_type = other DNA
gttttattgactcac

SEQ ID NO: 753 - DNA, 15 bp, synthetic construct
  source 1..15: mol_type = other DNA
gtgagtcaataaaac

SEQ ID NO: 754 - DNA, 15 bp, synthetic construct
  source 1..15: mol_type = other DNA
gttttgttgactcac

SEQ ID NO: 755 - DNA, 15 bp, synthetic construct
  source 1..15: mol_type = other DNA
gtgagtcaacaaaac

SEQ ID NO: 756 - DNA, 16 bp, synthetic construct
  source 1..16: mol_type = other DNA
atcggccaacacggca

SEQ ID NO: 757 - DNA, 16 bp, synthetic construct
  source 1..16: mol_type = other DNA
tgccgtgttggccgat

SEQ ID NO: 758 - DNA, 16 bp, synthetic construct
  source 1..16: mol_type = other DNA
atcggccaactcggca

SEQ ID NO: 759 - DNA, 16 bp, synthetic construct
  source 1..16: mol_type = other DNA
tgccgagttggccgat

SEQ ID NO: 760 - DNA, 16 bp, synthetic construct
  source 1..16: mol_type = other DNA
atcggctaacacggca

SEQ ID NO: 761 - DNA, 16 bp, synthetic construct
  source 1..16: mol_type = other DNA
tgccgtgttagccgat

SEQ ID NO: 762 - DNA, 16 bp, synthetic construct
  source 1..16: mol_type = other DNA
atcggctaactcggca

SEQ ID NO: 763 - DNA, 16 bp, synthetic construct
  source 1..16: mol_type = other DNA
tgccgagttagccgat

SEQ ID NO: 764 - DNA, 16 bp, synthetic construct
  source 1..16: mol_type = other DNA
gtcggccaacacggca

SEQ ID NO: 765 - DNA, 16 bp, synthetic construct
  source 1..16: mol_type = other DNA
tgccgtgttggccgac

SEQ ID NO: 766 - DNA, 16 bp, synthetic construct
  source 1..16: mol_type = other DNA
gtcggccaactcggca

SEQ ID NO: 767 - DNA, 16 bp, synthetic construct
  source 1..16: mol_type = other DNA
tgccgagttggccgac

SEQ ID NO: 768 - DNA, 16 bp, synthetic construct
  source 1..16: mol_type = other DNA
gtcggctaacacggca

SEQ ID NO: 769 - DNA, 16 bp, synthetic construct
  source 1..16: mol_type = other DNA
tgccgtgttagccgac

SEQ ID NO: 770 - DNA, 16 bp, synthetic construct
  source 1..16: mol_type = other DNA
gtcggctaactcggca

SEQ ID NO: 771 - DNA, 16 bp, synthetic construct
  source 1..16: mol_type = other DNA
tgccgagttagccgac

SEQ ID NO: 772 - DNA, 29 bp, synthetic construct
  source 1..29: mol_type = other DNA
actctttctctgctgcaacacctgctgtc

SEQ ID NO: 773 - DNA, 29 bp, synthetic construct
  source 1..29: mol_type = other DNA
gacagcaggtgttgcagcagagaaagagt

SEQ ID NO: 774 - DNA, 29 bp, synthetic construct
  source 1..29: mol_type = other DNA
actctttctctgctgcaacacctgctgtt

SEQ ID NO: 775 - DNA, 29 bp, synthetic construct
  source 1..29: mol_type = other DNA
aacagcaggtgttgcagcagagaaagagt

SEQ ID NO: 776 - DNA, 29 bp, synthetic construct
  source 1..29: mol_type = other DNA
actctttctctgctgcaatacctgctgtc

SEQ ID NO: 777 - DNA, 29 bp, synthetic construct
  source 1..29: mol_type = other DNA
gacagcaggtattgcagcagagaaagagt

SEQ ID NO: 778 - DNA, 29 bp, synthetic construct
  source 1..29: mol_type = other DNA
actctttctctgctgcaatacctgctgtt

SEQ ID NO: 779 - DNA, 29 bp, synthetic construct
  source 1..29: mol_type = other DNA
aacagcaggtattgcagcagagaaagagt

SEQ ID NO: 780-795 - skipped (16 entries)

SEQ ID NO: 796 - DNA, 10 bp, synthetic construct
  source 1..10: mol_type = other DNA
cgtctagaca

SEQ ID NO: 797 - DNA, 10 bp, synthetic construct
  source 1..10: mol_type = other DNA
tgtctagacg

SEQ ID NO: 798 - DNA, 10 bp, synthetic construct
  source 1..10: mol_type = other DNA
tgtctagaca

SEQ ID NO: 799 - DNA, 10 bp, synthetic construct
  source 1..10: mol_type = other DNA
tgtctagaca

SEQ ID NO: 800 - DNA, 10 bp, synthetic construct
  source 1..10: mol_type = other DNA
atgagtcata

SEQ ID NO: 801 - DNA, 10 bp, synthetic construct
  source 1..10: mol_type = other DNA
tatgactcat

SEQ ID NO: 802 - DNA, 10 bp, synthetic construct
  source 1..10: mol_type = other DNA
atgagtcatc

SEQ ID NO: 803 - DNA, 10 bp, synthetic construct
  source 1..10: mol_type = other DNA
gatgactcat

SEQ ID NO: 804 - DNA, 10 bp, synthetic construct
  source 1..10: mol_type = other DNA
atgagtcatt

SEQ ID NO: 805 - DNA, 10 bp, synthetic construct
  source 1..10: mol_type = other DNA
aatgactcat

SEQ ID NO: 806 - DNA, 10 bp, synthetic construct
  source 1..10: mol_type = other DNA
atgactcata

SEQ ID NO: 807 - DNA, 10 bp, synthetic construct
  source 1..10: mol_type = other DNA
tatgagtcat

SEQ ID NO: 808 - DNA, 10 bp, synthetic construct
  source 1..10: mol_type = other DNA
atgactcatc

SEQ ID NO: 809 - DNA, 10 bp, synthetic construct
  source 1..10: mol_type = other DNA
gatgagtcat

SEQ ID NO: 810 - DNA, 10 bp, synthetic construct
  source 1..10: mol_type = other DNA
atgactcatt

SEQ ID NO: 811 - DNA, 10 bp, synthetic construct
  source 1..10: mol_type = other DNA
aatgagtcat

SEQ ID NO: 812 - DNA, 11 bp, synthetic construct
  source 1..11: mol_type = other DNA
gaaatgagtca

SEQ ID NO: 813 - DNA, 11 bp, synthetic construct
  source 1..11: mol_type = other DNA
tgactcatttc

SEQ ID NO: 814 - DNA, 11 bp, synthetic construct
  source 1..11: mol_type = other DNA
gatgactcatc

SEQ ID NO: 815 - DNA, 11 bp, synthetic construct
  source 1..11: mol_type = other DNA
gatgagtcatc

SEQ ID NO: 816-823 - skipped (8 entries)

SEQ ID NO: 824 - DNA, 11 bp, synthetic construct
  source 1..11: mol_type = other DNA
atgagtcatcc

SEQ ID NO: 825 - DNA, 11 bp, synthetic construct
  source 1..11: mol_type = other DNA
ggatgactcat

SEQ ID NO: 826 - DNA, 11 bp, synthetic construct
  source 1..11: mol_type = other DNA
atgactcatcc

SEQ ID NO: 827 - DNA, 11 bp, synthetic construct
  source 1..11: mol_type = other DNA
ggatgagtcat

SEQ ID NO: 828 - DNA, 11 bp, synthetic construct
  source 1..11: mol_type = other DNA
gtgagtcatcc

SEQ ID NO: 829 - DNA, 11 bp, synthetic construct
  source 1..11: mol_type = other DNA
ggatgactcac

SEQ ID NO: 830 - DNA, 11 bp, synthetic construct
  source 1..11: mol_type = other DNA
gtgactcatcc

SEQ ID NO: 831 - DNA, 11 bp, synthetic construct
  source 1..11: mol_type = other DNA
ggatgagtcac

SEQ ID NO: 832-833 - skipped (2 entries)

SEQ ID NO: 834 - DNA, 13 bp, synthetic construct
  source 1..13: mol_type = other DNA
atgaataattaat

SEQ ID NO: 835 - DNA, 13 bp, synthetic construct
  source 1..13: mol_type = other DNA
attaattattcat

SEQ ID NO: 836 - DNA, 13 bp, synthetic construct
  source 1..13: mol_type = other DNA
atgaatatttaat

SEQ ID NO: 837 - DNA, 13 bp, synthetic construct
  source 1..13: mol_type = other DNA
attaaatattcat

SEQ ID NO: 838 - DNA, 13 bp, synthetic construct
  source 1..13: mol_type = other DNA
atgcataattaat

SEQ ID NO: 839 - DNA, 13 bp, synthetic construct
  source 1..13: mol_type = other DNA
attaattatgcat

SEQ ID NO: 840 - DNA, 13 bp, synthetic construct
  source 1..13: mol_type = other DNA
atgcatatttaat

SEQ ID NO: 841 - DNA, 13 bp, synthetic construct
  source 1..13: mol_type = other DNA
attaaatatgcat

SEQ ID NO: 842-843 - skipped (2 entries)

SEQ ID NO: 844 - DNA, 11 bp, synthetic construct
  source 1..11: mol_type = other DNA
cgaccaccgaa

SEQ ID NO: 845 - DNA, 11 bp, synthetic construct
  source 1..11: mol_type = other DNA
ttcggtggtcg

SEQ ID NO: 846 - DNA, 14 bp, synthetic construct
  source 1..14: mol_type = other DNA
aaagtcaaaagtca

SEQ ID NO: 847 - DNA, 14 bp, synthetic construct
  source 1..14: mol_type = other DNA
tgacttttgacttt

SEQ ID NO: 848-853 - skipped (6 entries)

SEQ ID NO: 854 - DNA, 12 bp, synthetic construct
  source 1..12: mol_type = other DNA
actcacaggccc

SEQ ID NO: 855 - DNA, 12 bp, synthetic construct
  source 1..12: mol_type = other DNA
gggcctgtgagt

SEQ ID NO: 856 - DNA, 12 bp, synthetic construct
  source 1..12: mol_type = other DNA
actcacaggtcc

SEQ ID NO: 857 - DNA, 12 bp, synthetic construct
  source 1..12: mol_type = other DNA
ggacctgtgagt

SEQ ID NO: 858 - DNA, 12 bp, synthetic construct
  source 1..12: mol_type = other DNA
gctcacaggccc

SEQ ID NO: 859 - DNA, 12 bp, synthetic construct
  source 1..12: mol_type = other DNA
gggcctgtgagc

SEQ ID NO: 860 - DNA, 12 bp, synthetic construct
  source 1..12: mol_type = other DNA
gctcacaggtcc

SEQ ID NO: 861 - DNA, 12 bp, synthetic construct
  source 1..12: mol_type = other DNA
ggacctgtgagc

SEQ ID NO: 862-869 - skipped (8 entries)

SEQ ID NO: 870 - DNA, 10 bp, synthetic construct
  source 1..10: mol_type = other DNA
agtcgtaaaa

SEQ ID NO: 871 - DNA, 10 bp, synthetic construct
  source 1..10: mol_type = other DNA
ttttacgact

SEQ ID NO: 872 - DNA, 10 bp, synthetic construct
  source 1..10: mol_type = other DNA
ggtcgtaaaa

SEQ ID NO: 873 - DNA, 10 bp, synthetic construct
  source 1..10: mol_type = other DNA
ttttacgacc

SEQ ID NO: 874 - DNA, 10 bp, synthetic construct
  source 1..10: mol_type = other DNA
ggtgagtcat

SEQ ID NO: 875 - DNA, 10 bp, synthetic construct
  source 1..10: mol_type = other DNA
atgactcacc

SEQ ID NO: 876 - DNA, 10 bp, synthetic construct
  source 1..10: mol_type = other DNA
ggtgactcat

SEQ ID NO: 877 - DNA, 10 bp, synthetic construct
  source 1..10: mol_type = other DNA
atgagtcacc

SEQ ID NO: 878 - DNA, 22 bp, synthetic construct
  source 1..22: mol_type = other DNA
cacatggcgcccaacatgggac

SEQ ID NO: 879 - DNA, 22 bp, synthetic construct
  source 1..22: mol_type = other DNA
gtcccatgttgggcgccatgtg

SEQ ID NO: 880 - DNA, 22 bp, synthetic construct
  source 1..22: mol_type = other DNA
cacatggcgcccaacattggac

SEQ ID NO: 881 - DNA, 22 bp, synthetic construct
  source 1..22: mol_type = other DNA
gtccaatgttgggcgccatgtg

SEQ ID NO: 882-897 - skipped (16 entries)

SEQ ID NO: 898 - DNA, 14 bp, synthetic construct
  source 1..14: mol_type = other DNA
ttaaccctttaggg

SEQ ID NO: 899 - DNA, 14 bp, synthetic construct
  source 1..14: mol_type = other DNA
ccctaaagggttaa

SEQ ID NO: 900 - DNA, 14 bp, synthetic construct
  source 1..14: mol_type = other DNA
ttaaccctttaggt

SEQ ID NO: 901 - DNA, 14 bp, synthetic construct
  source 1..14: mol_type = other DNA
acctaaagggttaa

SEQ ID NO: 902 - DNA, 14 bp, synthetic construct
  source 1..14: mol_type = other DNA
ttaaccctttagtg

SEQ ID NO: 903 - DNA, 14 bp, synthetic construct
  source 1..14: mol_type = other DNA
cactaaagggttaa

SEQ ID NO: 904 - DNA, 14 bp, synthetic construct
  source 1..14: mol_type = other DNA
ttaaccctttagtt

SEQ ID NO: 905 - DNA, 14 bp, synthetic construct
  source 1..14: mol_type = other DNA
aactaaagggttaa

SEQ ID NO: 906 - DNA, 14 bp, synthetic construct
  source 1..14: mol_type = other DNA
ttaaccctttcggg

SEQ ID NO: 907 - DNA, 14 bp, synthetic construct
  source 1..14: mol_type = other DNA
cccgaaagggttaa

SEQ ID NO: 908 - DNA, 14 bp, synthetic construct
  source 1..14: mol_type = other DNA
ttaaccctttcggt

SEQ ID NO: 909 - DNA, 14 bp, synthetic construct
  source 1..14: mol_type = other DNA
accgaaagggttaa

SEQ ID NO: 910 - DNA, 14 bp, synthetic construct
  source 1..14: mol_type = other DNA
ttaaccctttcgtg

SEQ ID NO: 911 - DNA, 14 bp, synthetic construct
  source 1..14: mol_type = other DNA
cacgaaagggttaa

SEQ ID NO: 912 - DNA, 14 bp, synthetic construct
  source 1..14: mol_type = other DNA
ttaaccctttcgtt

SEQ ID NO: 913 - DNA, 14 bp, synthetic construct
  source 1..14: mol_type = other DNA
aacgaaagggttaa

SEQ ID NO: 914 - DNA, 14 bp, synthetic construct
  source 1..14: mol_type = other DNA
ttaaccctttgggg

SEQ ID NO: 915 - DNA, 14 bp, synthetic construct
  source 1..14: mol_type = other DNA
ccccaaagggttaa

SEQ ID NO: 916 - DNA, 14 bp, synthetic construct
  source 1..14: mol_type = other DNA
ttaaccctttgggt

SEQ ID NO: 917 - DNA, 14 bp, synthetic construct
  source 1..14: mol_type = other DNA
acccaaagggttaa

SEQ ID NO: 918 - DNA, 14 bp, synthetic construct
  source 1..14: mol_type = other DNA
ttaaccctttggtg

SEQ ID NO: 919 - DNA, 14 bp, synthetic construct
  source 1..14: mol_type = other DNA
caccaaagggttaa

SEQ ID NO: 920 - DNA, 14 bp, synthetic construct
  source 1..14: mol_type = other DNA
ttaaccctttggtt

SEQ ID NO: 921 - DNA, 14 bp, synthetic construct
  source 1..14: mol_type = other DNA
aaccaaagggttaa

SEQ ID NO: 922 - DNA, 10 bp, synthetic construct
  source 1..10: mol_type = other DNA
atgacgtcac

SEQ ID NO: 923 - DNA, 10 bp, synthetic construct
  source 1..10: mol_type = other DNA
gtgacgtcat

SEQ ID NO: 924 - DNA, 10 bp, synthetic construct
  source 1..10: mol_type = other DNA
atgacgtcat

SEQ ID NO: 925 - DNA, 10 bp, synthetic construct
  source 1..10: mol_type = other DNA
atgacgtcat

SEQ ID NO: 926 - DNA, 12 bp, synthetic construct
  source 1..12: mol_type = other DNA
aatggttctgct

SEQ ID NO: 927 - DNA, 12 bp, synthetic construct
  source 1..12: mol_type = other DNA
agcagaaccatt

SEQ ID NO: 928 - DNA, 12 bp, synthetic construct
  source 1..12: mol_type = other DNA
aattgttctgct

SEQ ID NO: 929 - DNA, 12 bp, synthetic construct
  source 1..12: mol_type = other DNA
agcagaacaatt

SEQ ID NO: 930 - DNA, 12 bp, synthetic construct
  source 1..12: mol_type = other DNA
agtggttctgct

SEQ ID NO: 931 - DNA, 12 bp, synthetic construct
  source 1..12: mol_type = other DNA
agcagaaccact

SEQ ID NO: 932 - DNA, 12 bp, synthetic construct
  source 1..12: mol_type = other DNA
agttgttctgct

SEQ ID NO: 933 - DNA, 12 bp, synthetic construct
  source 1..12: mol_type = other DNA
agcagaacaact

SEQ ID NO: 934 - DNA, 12 bp, synthetic construct
  source 1..12: mol_type = other DNA
tgacaggtgtca

SEQ ID NO: 935 - DNA, 12 bp, synthetic construct
  source 1..12: mol_type = other DNA
tgacacctgtca

SEQ ID NO: 936 - DNA, 10 bp, synthetic construct
  source 1..10: mol_type = other DNA
cgtctagaca

SEQ ID NO: 937 - DNA, 10 bp, synthetic construct
  source 1..10: mol_type = other DNA
tgtctagacg

SEQ ID NO: 938 - DNA, 10 bp, synthetic construct
  source 1..10: mol_type = other DNA
tgtctagaca

SEQ ID NO: 939 - DNA, 10 bp, synthetic construct
  source 1..10: mol_type = other DNA
tgtctagaca

SEQ ID NO: 940 - DNA, 14 bp, synthetic construct
  source 1..14: mol_type = other DNA
ggttgccatggcaa

SEQ ID NO: 941 - DNA, 14 bp, synthetic construct
  source 1..14: mol_type = other DNA
ttgccatggcaacc

SEQ ID NO: 942-943 - skipped (2 entries)

SEQ ID NO: 944 - DNA, 15 bp, synthetic construct
  source 1..15: mol_type = other DNA
accagtgtaataatt

SEQ ID NO: 945 - DNA, 15 bp, synthetic construct
  source 1..15: mol_type = other DNA
aattattacactggt

SEQ ID NO: 946 - DNA, 15 bp, synthetic construct
  source 1..15: mol_type = other DNA
accagtgtaatcatt

SEQ ID NO: 947 - DNA, 15 bp, synthetic construct
  source 1..15: mol_type = other DNA
aatgattacactggt

SEQ ID NO: 948 - DNA, 15 bp, synthetic construct
  source 1..15: mol_type = other DNA
accagtgtagtaatt

SEQ ID NO: 949 - DNA, 15 bp, synthetic construct
  source 1..15: mol_type = other DNA
aattactacactggt

SEQ ID NO: 950 - DNA, 15 bp, synthetic construct
  source 1..15: mol_type = other DNA
accagtgtagtcatt

SEQ ID NO: 951 - DNA, 15 bp, synthetic construct
  source 1..15: mol_type = other DNA
aatgactacactggt

SEQ ID NO: 952 - DNA, 15 bp, synthetic construct
  source 1..15: mol_type = other DNA
accagtgtgataatt

SEQ ID NO: 953 - DNA, 15 bp, synthetic construct
  source 1..15: mol_type = other DNA
aattatcacactggt

SEQ ID NO: 954 - DNA, 15 bp, synthetic construct
  source 1..15: mol_type = other DNA
accagtgtgatcatt

SEQ ID NO: 955 - DNA, 15 bp, synthetic construct
  source 1..15: mol_type = other DNA
aatgatcacactggt

SEQ ID NO: 956 - DNA, 15 bp, synthetic construct
  source 1..15: mol_type = other DNA
accagtgtggtaatt

SEQ ID NO: 957 - DNA, 15 bp, synthetic construct
  source 1..15: mol_type = other DNA
aattaccacactggt

SEQ ID NO: 958 - DNA, 15 bp, synthetic construct
  source 1..15: mol_type = other DNA
accagtgtggtcatt

SEQ ID NO: 959 - DNA, 15 bp, synthetic construct
  source 1..15: mol_type = other DNA
aatgaccacactggt

SEQ ID NO: 960 - DNA, 15 bp, synthetic construct
  source 1..15: mol_type = other DNA
accactgtaataatt

SEQ ID NO: 961 - DNA, 15 bp, synthetic construct
  source 1..15: mol_type = other DNA
aattattacagtggt

SEQ ID NO: 962 - DNA, 15 bp, synthetic construct
  source 1..15: mol_type = other DNA
accactgtaatcatt

SEQ ID NO: 963 - DNA, 15 bp, synthetic construct
  source 1..15: mol_type = other DNA
aatgattacagtggt

SEQ ID NO: 964 - DNA, 15 bp, synthetic construct
  source 1..15: mol_type = other DNA
accactgtagtaatt

SEQ ID NO: 965 - DNA, 15 bp, synthetic construct
  source 1..15: mol_type = other DNA
aattactacagtggt

SEQ ID NO: 966 - DNA, 15 bp, synthetic construct
  source 1..15: mol_type = other DNA
accactgtagtcatt

SEQ ID NO: 967 - DNA, 15 bp, synthetic construct
  source 1..15: mol_type = other DNA
aatgactacagtggt

SEQ ID NO: 968 - DNA, 15 bp, synthetic construct
  source 1..15: mol_type = other DNA
accactgtgataatt

SEQ ID NO: 969 - DNA, 15 bp, synthetic construct
  source 1..15: mol_type = other DNA
aattatcacagtggt

SEQ ID NO: 970 - DNA, 15 bp, synthetic construct
  source 1..15: mol_type = other DNA
accactgtgatcatt

SEQ ID NO: 971 - DNA, 15 bp, synthetic construct
  source 1..15: mol_type = other DNA
aatgatcacagtggt

SEQ ID NO: 972 - DNA, 15 bp, synthetic construct
  source 1..15: mol_type = other DNA
accactgtggtaatt

SEQ ID NO: 973 - DNA, 15 bp, synthetic construct
  source 1..15: mol_type = other DNA
aattaccacagtggt

SEQ ID NO: 974 - DNA, 15 bp, synthetic construct
  source 1..15: mol_type = other DNA
accactgtggtcatt

SEQ ID NO: 975 - DNA, 15 bp, synthetic construct
  source 1..15: mol_type = other DNA
aatgaccacagtggt

SEQ ID NO: 976 - DNA, 15 bp, synthetic construct
  source 1..15: mol_type = other DNA
actagtgtaataatt

SEQ ID NO: 977 - DNA, 15 bp, synthetic construct
  source 1..15: mol_type = other DNA
aattattacactagt

SEQ ID NO: 978 - DNA, 15 bp, synthetic construct
  source 1..15: mol_type = other DNA
actagtgtaatcatt

SEQ ID NO: 979 - DNA, 15 bp, synthetic construct
  source 1..15: mol_type = other DNA
aatgattacactagt

SEQ ID NO: 980 - DNA, 15 bp, synthetic construct
  source 1..15: mol_type = other DNA
actagtgtagtaatt

SEQ ID NO: 981 - DNA, 15 bp, synthetic construct
  source 1..15: mol_type = other DNA
aattactacactagt

SEQ ID NO: 982 - DNA, 15 bp, synthetic construct
  source 1..15: mol_type = other DNA
actagtgtagtcatt

SEQ ID NO: 983 - DNA, 15 bp, synthetic construct
  source 1..15: mol_type = other DNA
aatgactacactagt

SEQ ID NO: 984 - DNA, 15 bp, synthetic construct
  source 1..15: mol_type = other DNA
actagtgtgataatt

SEQ ID NO: 985 - DNA, 15 bp, synthetic construct
  source 1..15: mol_type = other DNA
aattatcacactagt

SEQ ID NO: 986 - DNA, 15 bp, synthetic construct
  source 1..15: mol_type = other DNA
actagtgtgatcatt

SEQ ID NO: 987 - DNA, 15 bp, synthetic construct
  source 1..15: mol_type = other DNA
aatgatcacactagt

SEQ ID NO: 988 - DNA, 15 bp, synthetic construct
  source 1..15: mol_type = other DNA
actagtgtggtaatt

SEQ ID NO: 989 - DNA, 15 bp, synthetic construct
  source 1..15: mol_type = other DNA
aattaccacactagt

SEQ ID NO: 990 - DNA, 15 bp, synthetic construct
  source 1..15: mol_type = other DNA
actagtgtggtcatt

SEQ ID NO: 991 - DNA, 15 bp, synthetic construct
  source 1..15: mol_type = other DNA
aatgaccacactagt

SEQ ID NO: 992 - DNA, 15 bp, synthetic construct
  source 1..15: mol_type = other DNA
actactgtaataatt

SEQ ID NO: 993 - DNA, 15 bp, synthetic construct
  source 1..15: mol_type = other DNA
aattattacagtagt

SEQ ID NO: 994 - DNA, 15 bp, synthetic construct
  source 1..15: mol_type = other DNA
actactgtaatcatt

SEQ ID NO: 995 - DNA, 15 bp, synthetic construct
  source 1..15: mol_type = other DNA
aatgattacagtagt

SEQ ID NO: 996 - DNA, 15 bp, synthetic construct
  source 1..15: mol_type = other DNA
actactgtagtaatt

SEQ ID NO: 997 - DNA, 15 bp, synthetic construct
  source 1..15: mol_type = other DNA
aattactacagtagt

SEQ ID NO: 998 - DNA, 15 bp, synthetic construct
  source 1..15: mol_type = other DNA
actactgtagtcatt

SEQ ID NO: 999 - DNA, 15 bp, synthetic construct
  source 1..15: mol_type = other DNA
aatgactacagtagt

SEQ ID NO: 1000 - DNA, 15 bp, synthetic construct
  source 1..15: mol_type = other DNA
actactgtgataatt

SEQ ID NO: 1001 - DNA, 15 bp, synthetic construct
  source 1..15: mol_type = other DNA
aattatcacagtagt

SEQ ID NO: 1002 - DNA, 15 bp, synthetic construct
  source 1..15: mol_type = other DNA
actactgtgatcatt

SEQ ID NO: 1003 - DNA, 15 bp, synthetic construct
  source 1..15: mol_type = other DNA
aatgatcacagtagt

SEQ ID NO: 1004 - DNA, 15 bp, synthetic construct
  source 1..15: mol_type = other DNA
actactgtggtaatt

SEQ ID NO: 1005 - DNA, 15 bp, synthetic construct
  source 1..15: mol_type = other DNA
aattaccacagtagt

SEQ ID NO: 1006 - DNA, 15 bp, synthetic construct
  source 1..15: mol_type = other DNA
actactgtggtcatt

SEQ ID NO: 1007 - DNA, 15 bp, synthetic construct
  source 1..15: mol_type = other DNA
aatgaccacagtagt

SEQ ID NO: 1008 - DNA, 12 bp, synthetic construct
  source 1..12: mol_type = other DNA
tgacaggtgtca

SEQ ID NO: 1009 - DNA, 12 bp, synthetic construct
  source 1..12: mol_type = other DNA
tgacacctgtca

SEQ ID NO: 1010 - DNA, 12 bp, synthetic construct
  source 1..12: mol_type = other DNA
tgacagctgtca

SEQ ID NO: 1011 - DNA, 12 bp, synthetic construct
  source 1..12: mol_type = other DNA
tgacagctgtca

SEQ ID NO: 1012 - DNA, 10 bp, synthetic construct
  source 1..10: mol_type = other DNA
tgattgacag

SEQ ID NO: 1013 - DNA, 10 bp, synthetic construct
  source 1..10: mol_type = other DNA
ctgtcaatca

SEQ ID NO: 1014 - DNA, 10 bp, synthetic construct
  source 1..10: mol_type = other DNA
gatgacgtca

SEQ ID NO: 1015 - DNA, 10 bp, synthetic construct
  source 1..10: mol_type = other DNA
tgacgtcatc

SEQ ID NO: 1016-1017 - skipped (2 entries)

SEQ ID NO: 1018 - DNA, 16 bp, synthetic construct
  source 1..16: mol_type = other DNA
aacaatatgcagtgtt

SEQ ID NO: 1019 - DNA, 16 bp, synthetic construct
  source 1..16: mol_type = other DNA
aacactgcatattgtt

SEQ ID NO: 1020 - DNA, 16 bp, synthetic construct
  source 1..16: mol_type = other DNA
aacaatatgcattgtt

SEQ ID NO: 1021 - DNA, 16 bp, synthetic construct
  source 1..16: mol_type = other DNA
aacaatgcatattgtt

SEQ ID NO: 1022 - DNA, 16 bp, synthetic construct
  source 1..16: mol_type = other DNA
aacaatgtgcagtgtt

SEQ ID NO: 1023 - DNA, 16 bp, synthetic construct
  source 1..16: mol_type = other DNA
aacactgcacattgtt

SEQ ID NO: 1024 - DNA, 16 bp, synthetic construct
  source 1..16: mol_type = other DNA
aacaatgtgcattgtt

SEQ ID NO: 1025 - DNA, 16 bp, synthetic construct
  source 1..16: mol_type = other DNA
aacaatgcacattgtt

SEQ ID NO: 1026 - DNA, 15 bp, synthetic construct
  source 1..15: mol_type = other DNA
gcactaccatagtga

SEQ ID NO: 1027 - DNA, 15 bp, synthetic construct
  source 1..15: mol_type = other DNA
tcactatggtagtgc

SEQ ID NO: 1028 - DNA, 15 bp, synthetic construct
  source 1..15: mol_type = other DNA
gcactaccatagtgc

SEQ ID NO: 1029 - DNA, 15 bp, synthetic construct
  source 1..15: mol_type = other DNA
gcactatggtagtgc

SEQ ID NO: 1030 - DNA, 15 bp, synthetic construct
  source 1..15: mol_type = other DNA
gcactaccgtagtga

SEQ ID NO: 1031 - DNA, 15 bp, synthetic construct
  source 1..15: mol_type = other DNA
tcactacggtagtgc

SEQ ID NO: 1032 - DNA, 15 bp, synthetic construct
  source 1..15: mol_type = other DNA
gcactaccgtagtgc

SEQ ID NO: 1033 - DNA, 15 bp, synthetic construct
  source 1..15: mol_type = other DNA
gcactacggtagtgc

SEQ ID NO: 1034 - DNA, 15 bp, synthetic construct
  source 1..15: mol_type = other DNA
gcactatcatagtga

SEQ ID NO: 1035 - DNA, 15 bp, synthetic construct
  source 1..15: mol_type = other DNA
tcactatgatagtgc

SEQ ID NO: 1036 - DNA, 15 bp, synthetic construct
  source 1..15: mol_type = other DNA
gcactatcatagtgc

SEQ ID NO: 1037 - DNA, 15 bp, synthetic construct
  source 1..15: mol_type = other DNA
gcactatgatagtgc

SEQ ID NO: 1038 - DNA, 15 bp, synthetic construct
  source 1..15: mol_type = other DNA
gcactatcgtagtga

SEQ ID NO: 1039 - DNA, 15 bp, synthetic construct
  source 1..15: mol_type = other DNA
tcactacgatagtgc

SEQ ID NO: 1040 - DNA, 15 bp, synthetic construct
  source 1..15: mol_type = other DNA
gcactatcgtagtgc

SEQ ID NO: 1041 - DNA, 15 bp, synthetic construct
  source 1..15: mol_type = other DNA
gcactacgatagtgc

SEQ ID NO: 1042 - DNA, 15 bp, synthetic construct
  source 1..15: mol_type = other DNA
tcactaccatagtga

SEQ ID NO: 1043 - DNA, 15 bp, synthetic construct
  source 1..15: mol_type = other DNA
tcactatggtagtga

SEQ ID NO: 1044 - DNA, 15 bp, synthetic construct
  source 1..15: mol_type = other DNA
tcactaccatagtgc

SEQ ID NO: 1045 - DNA, 15 bp, synthetic construct
  source 1..15: mol_type = other DNA
gcactatggtagtga

SEQ ID NO: 1046 - DNA, 15 bp, synthetic construct
  source 1..15: mol_type = other DNA
tcactaccgtagtga

SEQ ID NO: 1047 - DNA, 15 bp, synthetic construct
  source 1..15: mol_type = other DNA
tcactacggtagtga

SEQ ID NO: 1048 - DNA, 15 bp, synthetic construct
  source 1..15: mol_type = other DNA
tcactaccgtagtgc

SEQ ID NO: 1049 - DNA, 15 bp, synthetic construct
  source 1..15: mol_type = other DNA
gcactacggtagtga

SEQ ID NO: 1050 - DNA, 15 bp, synthetic construct
  source 1..15: mol_type = other DNA
tcactatcatagtga

SEQ ID NO: 1051 - DNA, 15 bp, synthetic construct
  source 1..15: mol_type = other DNA
tcactatgatagtga

SEQ ID NO: 1052 - DNA, 15 bp, synthetic construct
  source 1..15: mol_type = other DNA
tcactatcatagtgc

SEQ ID NO: 1053 - DNA, 15 bp, synthetic construct
  source 1..15: mol_type = other DNA
gcactatgatagtga

SEQ ID NO: 1054 - DNA, 15 bp, synthetic construct
  source 1..15: mol_type = other DNA
tcactatcgtagtga

SEQ ID NO: 1055 - DNA, 15 bp, synthetic construct
  source 1..15: mol_type = other DNA
tcactacgatagtga

SEQ ID NO: 1056 - DNA, 15 bp, synthetic construct
  source 1..15: mol_type = other DNA
tcactatcgtagtgc

SEQ ID NO: 1057 - DNA, 15 bp, synthetic construct
  source 1..15: mol_type = other DNA
gcactacgatagtga

SEQ ID NO: 1058 - DNA, 10 bp, synthetic construct
  source 1..10: mol_type = other DNA
tgactcagca

SEQ ID NO: 1059 - DNA, 10 bp, synthetic construct
  source 1..10: mol_type = other DNA
tgctgagtca

SEQ ID NO: 1060 - DNA, 11 bp, synthetic construct
  source 1..11: mol_type = other DNA
ggggaatcccc

SEQ ID NO: 1061 - DNA, 11 bp, synthetic construct
  source 1..11: mol_type = other DNA
ggggattcccc

SEQ ID NO: 1062 - DNA, 11 bp, synthetic construct
  source 1..11: mol_type = other DNA
ggggattcccc

SEQ ID NO: 1063 - DNA, 11 bp, synthetic construct
  source 1..11: mol_type = other DNA
ggggaatcccc

SEQ ID NO: 1064-1065 - skipped (2 entries)

SEQ ID NO: 1066 - DNA, 10 bp, synthetic construct
  source 1..10: mol_type = other DNA
tgctgagtca

SEQ ID NO: 1067 - DNA, 10 bp, synthetic construct
  source 1..10: mol_type = other DNA
tgactcagca

SEQ ID NO: 1068 - DNA, 12 bp, synthetic construct
  source 1..12: mol_type = other DNA
tgacagctgtca

SEQ ID NO: 1069 - DNA, 12 bp, synthetic construct
  source 1..12: mol_type = other DNA
tgacagctgtca

SEQ ID NO: 1070 - DNA, 11 bp, synthetic construct
  source 1..11: mol_type = other DNA
taacccaatca

SEQ ID NO: 1071 - DNA, 11 bp, synthetic construct
  source 1..11: mol_type = other DNA
tgattgggtta

SEQ ID NO: 1072 - DNA, 11 bp, synthetic construct
  source 1..11: mol_type = other DNA
taacctaatca

SEQ ID NO: 1073 - DNA, 11 bp, synthetic construct
  source 1..11: mol_type = other DNA
tgattaggtta

SEQ ID NO: 1074 - DNA, 11 bp, synthetic construct
  source 1..11: mol_type = other DNA
taactcaatca

SEQ ID NO: 1075 - DNA, 11 bp, synthetic construct
  source 1..11: mol_type = other DNA
tgattgagtta

SEQ ID NO: 1076 - DNA, 11 bp, synthetic construct
  source 1..11: mol_type = other DNA
taacttaatca

SEQ ID NO: 1077 - DNA, 11 bp, synthetic construct
  source 1..11: mol_type = other DNA
tgattaagtta

SEQ ID NO: 1078 - DNA, 11 bp, synthetic construct
  source 1..11: mol_type = other DNA
taatccaatca

SEQ ID NO: 1079 - DNA, 11 bp, synthetic construct
  source 1..11: mol_type = other DNA
tgattggatta

SEQ ID NO: 1080 - DNA, 11 bp, synthetic construct
  source 1..11: mol_type = other DNA
taatctaatca

SEQ ID NO: 1081 - DNA, 11 bp, synthetic construct
  source 1..11: mol_type = other DNA
tgattagatta

SEQ ID NO: 1082 - DNA, 11 bp, synthetic construct
  source 1..11: mol_type = other DNA
taattcaatca

SEQ ID NO: 1083 - DNA, 11 bp, synthetic construct
  source 1..11: mol_type = other DNA
tgattgaatta

SEQ ID NO: 1084 - DNA, 11 bp, synthetic construct
  source 1..11: mol_type = other DNA
taatttaatca

SEQ ID NO: 1085 - DNA, 11 bp, synthetic construct
  source 1..11: mol_type = other DNA
tgattaaatta

SEQ ID NO: 1086 - DNA, 13 bp, synthetic construct
  source 1..13: mol_type = other DNA
tgctgagtcagca

SEQ ID NO: 1087 - DNA, 13 bp, synthetic construct
  source 1..13: mol_type = other DNA
tgctgactcagca

SEQ ID NO: 1088 - DNA, 13 bp, synthetic construct
  source 1..13: mol_type = other DNA
tgctgactcagca

SEQ ID NO: 1089 - DNA, 13 bp, synthetic construct
  source 1..13: mol_type = other DNA
tgctgagtcagca

SEQ ID NO: 1090 - DNA, 16 bp, synthetic construct
  source 1..16: mol_type = other DNA
gagttcatcgagttca

SEQ ID NO: 1091 - DNA, 16 bp, synthetic construct
  source 1..16: mol_type = other DNA
tgaactcgatgaactc

SEQ ID NO: 1092 - DNA, 16 bp, synthetic construct
  source 1..16: mol_type = other DNA
gagttcatcgggttca

SEQ ID NO: 1093 - DNA, 16 bp, synthetic construct
  source 1..16: mol_type = other DNA
tgaacccgatgaactc

SEQ ID NO: 1094 - DNA, 16 bp, synthetic construct
  source 1..16: mol_type = other DNA
gagttcattgagttca

SEQ ID NO: 1095 - DNA, 16 bp, synthetic construct
  source 1..16: mol_type = other DNA
tgaactcaatgaactc

SEQ ID NO: 1096 - DNA, 16 bp, synthetic construct
  source 1..16: mol_type = other DNA
gagttcattgggttca

SEQ ID NO: 1097 - DNA, 16 bp, synthetic construct
  source 1..16: mol_type = other DNA
tgaacccaatgaactc

SEQ ID NO: 1098 - DNA, 16 bp, synthetic construct
  source 1..16: mol_type = other DNA
gggttcatcgagttca

SEQ ID NO: 1099 - DNA, 16 bp, synthetic construct
  source 1..16: mol_type = other DNA
tgaactcgatgaaccc

SEQ ID NO: 1100 - DNA, 16 bp, synthetic construct
  source 1..16: mol_type = other DNA
gggttcatcgggttca

SEQ ID NO: 1101 - DNA, 16 bp, synthetic construct
  source 1..16: mol_type = other DNA
tgaacccgatgaaccc

SEQ ID NO: 1102 - DNA, 16 bp, synthetic construct
  source 1..16: mol_type = other DNA
gggttcattgagttca

SEQ ID NO: 1103 - DNA, 16 bp, synthetic construct
  source 1..16: mol_type = other DNA
tgaactcaatgaaccc

SEQ ID NO: 1104 - DNA, 16 bp, synthetic construct
  source 1..16: mol_type = other DNA
gggttcattgggttca

SEQ ID NO: 1105 - DNA, 16 bp, synthetic construct
  source 1..16: mol_type = other DNA
tgaacccaatgaaccc

SEQ ID NO: 1106 - DNA, 15 bp, synthetic construct
  source 1..15: mol_type = other DNA
ctttcattatgacta

SEQ ID NO: 1107 - DNA, 15 bp, synthetic construct
  source 1..15: mol_type = other DNA
tagtcataatgaaag

SEQ ID NO: 1108 - DNA, 15 bp, synthetic construct
  source 1..15: mol_type = other DNA
ctttcattatgactc

SEQ ID NO: 1109 - DNA, 15 bp, synthetic construct
  source 1..15: mol_type = other DNA
gagtcataatgaaag

SEQ ID NO: 1110 - DNA, 15 bp, synthetic construct
  source 1..15: mol_type = other DNA
ctttcattatgactg

SEQ ID NO: 1111 - DNA, 15 bp, synthetic construct
  source 1..15: mol_type = other DNA
cagtcataatgaaag

SEQ ID NO: 1112 - DNA, 11 bp, synthetic construct
  source 1..11: mol_type = other DNA
gaccacccatg

SEQ ID NO: 1113 - DNA, 11 bp, synthetic construct
  source 1..11: mol_type = other DNA
catgggtggtc

SEQ ID NO: 1114 - DNA, 20 bp, synthetic construct
  source 1..20: mol_type = other DNA
catcccatacggatgaggca

SEQ ID NO: 1115 - DNA, 20 bp, synthetic construct
  source 1..20: mol_type = other DNA
tgcctcatccgtatgggatg

SEQ ID NO: 1116 - DNA, 20 bp, synthetic construct
  source 1..20: mol_type = other DNA
catcccatacggatgaggcc

SEQ ID NO: 1117 - DNA, 20 bp, synthetic construct
  source 1..20: mol_type = other DNA
ggcctcatccgtatgggatg

SEQ ID NO: 1118 - DNA, 20 bp, synthetic construct
  source 1..20: mol_type = other DNA
catcccatacggatgaggta

SEQ ID NO: 1119 - DNA, 20 bp, synthetic construct
  source 1..20: mol_type = other DNA
tacctcatccgtatgggatg

SEQ ID NO: 1120 - DNA, 20 bp, synthetic construct
  source 1..20: mol_type = other DNA
catcccatacggatgaggtc

SEQ ID NO: 1121 - DNA, 20 bp, synthetic construct
  source 1..20: mol_type = other DNA
gacctcatccgtatgggatg

SEQ ID NO: 1122 - DNA, 20 bp, synthetic construct
  source 1..20: mol_type = other DNA
catcccatacggatgagtca

SEQ ID NO: 1123 - DNA, 20 bp, synthetic construct
  source 1..20: mol_type = other DNA
tgactcatccgtatgggatg

SEQ ID NO: 1124 - DNA, 20 bp, synthetic construct
  source 1..20: mol_type = other DNA
catcccatacggatgagtcc

SEQ ID NO: 1125 - DNA, 20 bp, synthetic construct
  source 1..20: mol_type = other DNA
ggactcatccgtatgggatg

SEQ ID NO: 1126 - DNA, 20 bp, synthetic construct
  source 1..20: mol_type = other DNA
catcccatacggatgagtta

SEQ ID NO: 1127 - DNA, 20 bp, synthetic construct
  source 1..20: mol_type = other DNA
taactcatccgtatgggatg

SEQ ID NO: 1128 - DNA, 20 bp, synthetic construct
  source 1..20: mol_type = other DNA
catcccatacggatgagttc

SEQ ID NO: 1129 - DNA, 20 bp, synthetic construct
  source 1..20: mol_type = other DNA
gaactcatccgtatgggatg

SEQ ID NO: 1130 - DNA, 20 bp, synthetic construct
  source 1..20: mol_type = other DNA
catcccatacggatgacgca

SEQ ID NO: 1131 - DNA, 20 bp, synthetic construct
  source 1..20: mol_type = other DNA
tgcgtcatccgtatgggatg

SEQ ID NO: 1132 - DNA, 20 bp, synthetic construct
  source 1..20: mol_type = other DNA
catcccatacggatgacgcc

SEQ ID NO: 1133 - DNA, 20 bp, synthetic construct
  source 1..20: mol_type = other DNA
ggcgtcatccgtatgggatg

SEQ ID NO: 1134 - DNA, 20 bp, synthetic construct
  source 1..20: mol_type = other DNA
catcccatacggatgacgta

SEQ ID NO: 1135 - DNA, 20 bp, synthetic construct
  source 1..20: mol_type = other DNA
tacgtcatccgtatgggatg

SEQ ID NO: 1136 - DNA, 20 bp, synthetic construct
  source 1..20: mol_type = other DNA
catcccatacggatgacgtc

SEQ ID NO: 1137 - DNA, 20 bp, synthetic construct
  source 1..20: mol_type = other DNA
gacgtcatccgtatgggatg

SEQ ID NO: 1138 - DNA, 20 bp, synthetic construct
  source 1..20: mol_type = other DNA
catcccatacggatgactca

SEQ ID NO: 1139 - DNA, 20 bp, synthetic construct
  source 1..20: mol_type = other DNA
tgagtcatccgtatgggatg

SEQ ID NO: 1140 - DNA, 20 bp, synthetic construct
  source 1..20: mol_type = other DNA
catcccatacggatgactcc

SEQ ID NO: 1141 - DNA, 20 bp, synthetic construct
  source 1..20: mol_type = other DNA
ggagtcatccgtatgggatg

SEQ ID NO: 1142 - DNA, 20 bp, synthetic construct
  source 1..20: mol_type = other DNA
catcccatacggatgactta

SEQ ID NO: 1143 - DNA, 20 bp, synthetic construct
  source 1..20: mol_type = other DNA
taagtcatccgtatgggatg

SEQ ID NO: 1144 - DNA, 20 bp, synthetic construct
  source 1..20: mol_type = other DNA
catcccatacggatgacttc

SEQ ID NO: 1145 - DNA, 20 bp, synthetic construct
  source 1..20: mol_type = other DNA
gaagtcatccgtatgggatg

SEQ ID NO: 1146 - DNA, 20 bp, synthetic construct
  source 1..20: mol_type = other DNA
catcccatacgggtgaggca

SEQ ID NO: 1147 - DNA, 20 bp, synthetic construct
  source 1..20: mol_type = other DNA
tgcctcacccgtatgggatg

SEQ ID NO: 1148 - DNA, 20 bp, synthetic construct
  source 1..20: mol_type = other DNA
catcccatacgggtgaggcc

SEQ ID NO: 1149 - DNA, 20 bp, synthetic construct
  source 1..20: mol_type = other DNA
ggcctcacccgtatgggatg

SEQ ID NO: 1150 - DNA, 20 bp, synthetic construct
  source 1..20: mol_type = other DNA
catcccatacgggtgaggta

SEQ ID NO: 1151 - DNA, 20 bp, synthetic construct
  source 1..20: mol_type = other DNA
tacctcacccgtatgggatg

SEQ ID NO: 1152 - DNA, 20 bp, synthetic construct
  source 1..20: mol_type = other DNA
catcccatacgggtgaggtc

SEQ ID NO: 1153 - DNA, 20 bp, synthetic construct
  source 1..20: mol_type = other DNA
gacctcacccgtatgggatg

SEQ ID NO: 1154 - DNA, 20 bp, synthetic construct
  source 1..20: mol_type = other DNA
catcccatacgggtgagtca

SEQ ID NO: 1155 - DNA, 20 bp, synthetic construct
  source 1..20: mol_type = other DNA
tgactcacccgtatgggatg

SEQ ID NO: 1156 - DNA, 20 bp, synthetic construct
  source 1..20: mol_type = other DNA
catcccatacgggtgagtcc

SEQ ID NO: 1157 - DNA, 20 bp, synthetic construct
  source 1..20: mol_type = other DNA
ggactcacccgtatgggatg

SEQ ID NO: 1158 - DNA, 20 bp, synthetic construct
  source 1..20: mol_type = other DNA
catcccatacgggtgagtta

SEQ ID NO: 1159 - DNA, 20 bp, synthetic construct
  source 1..20: mol_type = other DNA
taactcacccgtatgggatg

SEQ ID NO: 1160 - DNA, 20 bp, synthetic construct
  source 1..20: mol_type = other DNA
catcccatacgggtgagttc

SEQ ID NO: 1161 - DNA, 20 bp, synthetic construct
  source 1..20: mol_type = other DNA
gaactcacccgtatgggatg

SEQ ID NO: 1162 - DNA, 20 bp, synthetic construct
  source 1..20: mol_type = other DNA
catcccatacgggtgacgca

SEQ ID NO: 1163 - DNA, 20 bp, synthetic construct
  source 1..20: mol_type = other DNA
tgcgtcacccgtatgggatg

SEQ ID NO: 1164 - DNA, 20 bp, synthetic construct
  source 1..20: mol_type = other DNA
catcccatacgggtgacgcc

SEQ ID NO: 1165 - DNA, 20 bp, synthetic construct
  source 1..20: mol_type = other DNA
ggcgtcacccgtatgggatg

SEQ ID NO: 1166 - DNA, 20 bp, synthetic construct
  source 1..20: mol_type = other DNA
catcccatacgggtgacgta

SEQ ID NO: 1167 - DNA, 20 bp, synthetic construct
  source 1..20: mol_type = other DNA
tacgtcacccgtatgggatg

SEQ ID NO: 1168 - DNA, 20 bp, synthetic construct
  source 1..20: mol_type = other DNA
catcccatacgggtgacgtc

SEQ ID NO: 1169 - DNA, 20 bp, synthetic construct
  source 1..20: mol_type = other DNA
gacgtcacccgtatgggatg

SEQ ID NO: 1170 - DNA, 20 bp, synthetic construct
  source 1..20: mol_type = other DNA
catcccatacgggtgactca

SEQ ID NO: 1171 - DNA, 20 bp, synthetic construct
  source 1..20: mol_type = other DNA
tgagtcacccgtatgggatg

SEQ ID NO: 1172 - DNA, 20 bp, synthetic construct
  source 1..20: mol_type = other DNA
catcccatacgggtgactcc

SEQ ID NO: 1173 - DNA, 20 bp, synthetic construct
  source 1..20: mol_type = other DNA
ggagtcacccgtatgggatg

SEQ ID NO: 1174 - DNA, 20 bp, synthetic construct
  source 1..20: mol_type = other DNA
catcccatacgggtgactta

SEQ ID NO: 1175 - DNA, 20 bp, synthetic construct
  source 1..20: mol_type = other DNA
taagtcacccgtatgggatg

SEQ ID NO: 1176 - DNA, 20 bp, synthetic construct
  source 1..20: mol_type = other DNA
catcccatacgggtgacttc

SEQ ID NO: 1177 - DNA, 20 bp, synthetic construct
  source 1..20: mol_type = other DNA
gaagtcacccgtatgggatg

SEQ ID NO: 1178 - DNA, 20 bp, synthetic construct
  source 1..20: mol_type = other DNA
catcccttacggatgaggca

SEQ ID NO: 1179 - DNA, 20 bp, synthetic construct
  source 1..20: mol_type = other DNA
tgcctcatccgtaagggatg

SEQ ID NO: 1180 - DNA, 20 bp, synthetic construct
  source 1..20: mol_type = other DNA
catcccttacggatgaggcc

SEQ ID NO: 1181 - DNA, 20 bp, synthetic construct
  source 1..20: mol_type = other DNA
ggcctcatccgtaagggatg

SEQ ID NO: 1182 - DNA, 20 bp, synthetic construct
  source 1..20: mol_type = other DNA
catcccttacggatgaggta

SEQ ID NO: 1183 - DNA, 20 bp, synthetic construct
  source 1..20: mol_type = other DNA
tacctcatccgtaagggatg

SEQ ID NO: 1184 - DNA, 20 bp, synthetic construct
  source 1..20: mol_type = other DNA
catcccttacggatgaggtc

SEQ ID NO: 1185 - DNA, 20 bp, synthetic construct
  source 1..20: mol_type = other DNA
gacctcatccgtaagggatg

SEQ ID NO: 1186 - DNA, 20 bp, synthetic construct
  source 1..20: mol_type = other DNA
catcccttacggatgagtca

SEQ ID NO: 1187 - DNA, 20 bp, synthetic construct
  source 1..20: mol_type = other DNA
tgactcatccgtaagggatg

SEQ ID NO: 1188 - DNA, 20 bp, synthetic construct
  source 1..20: mol_type = other DNA
catcccttacggatgagtcc

SEQ ID NO: 1189 - DNA, 20 bp, synthetic construct
  source 1..20: mol_type = other DNA
ggactcatccgtaagggatg

SEQ ID NO: 1190 - DNA, 20 bp, synthetic construct
  source 1..20: mol_type = other DNA
catcccttacggatgagtta

SEQ ID NO: 1191 - DNA, 20 bp, synthetic construct
  source 1..20: mol_type = other DNA
taactcatccgtaagggatg

SEQ ID NO: 1192 - DNA, 20 bp, synthetic construct
  source 1..20: mol_type = other DNA
catcccttacggatgagttc

SEQ ID NO: 1193 - DNA, 20 bp, synthetic construct
  source 1..20: mol_type = other DNA
gaactcatccgtaagggatg

SEQ ID NO: 1194 - DNA, 20 bp, synthetic construct
  source 1..20: mol_type = other DNA
catcccttacggatgacgca

SEQ ID NO: 1195 - DNA, 20 bp, synthetic construct
  source 1..20: mol_type = other DNA
tgcgtcatccgtaagggatg

SEQ ID NO: 1196 - DNA, 20 bp, synthetic construct
  source 1..20: mol_type = other DNA
catcccttacggatgacgcc

SEQ ID NO: 1197 - DNA, 20 bp, synthetic construct
  source 1..20: mol_type = other DNA
ggcgtcatccgtaagggatg

SEQ ID NO: 1198 - DNA, 20 bp, synthetic construct
  source 1..20: mol_type = other DNA
catcccttacggatgacgta

SEQ ID NO: 1199 - DNA, 20 bp, synthetic construct
  source 1..20: mol_type = other DNA
tacgtcatccgtaagggatg

SEQ ID NO: 1200 - DNA, 20 bp, synthetic construct
  source 1..20: mol_type = other DNA
catcccttacggatgacgtc

SEQ ID NO: 1201 - DNA, 20 bp, synthetic construct
  source 1..20: mol_type = other DNA
gacgtcatccgtaagggatg

SEQ ID NO: 1202 - DNA, 20 bp, synthetic construct
  source 1..20: mol_type = other DNA
catcccttacggatgactca

SEQ ID NO: 1203 - DNA, 20 bp, synthetic construct
  source 1..20: mol_type = other DNA
tgagtcatccgtaagggatg

SEQ ID NO: 1204 - DNA, 20 bp, synthetic construct
  source 1..20: mol_type = other DNA
catcccttacggatgactcc

SEQ ID NO: 1205 - DNA, 20 bp, synthetic construct
  source 1..20: mol_type = other DNA
ggagtcatccgtaagggatg

SEQ ID NO: 1206 - DNA, 20 bp, synthetic construct
  source 1..20: mol_type = other DNA
catcccttacggatgactta

SEQ ID NO: 1207 - DNA, 20 bp, synthetic construct
  source 1..20: mol_type = other DNA
taagtcatccgtaagggatg

SEQ ID NO: 1208 - DNA, 20 bp, synthetic construct
  source 1..20: mol_type = other DNA
catcccttacggatgacttc

SEQ ID NO: 1209 - DNA, 20 bp, synthetic construct
  source 1..20: mol_type = other DNA
gaagtcatccgtaagggatg

SEQ ID NO: 1210 - DNA, 20 bp, synthetic construct
  source 1..20: mol_type = other DNA
catcccttacgggtgaggca

SEQ ID NO: 1211 - DNA, 20 bp, synthetic construct
  source 1..20: mol_type = other DNA
tgcctcacccgtaagggatg

SEQ ID NO: 1212 - DNA, 20 bp, synthetic construct
  source 1..20: mol_type = other DNA
catcccttacgggtgaggcc

SEQ ID NO: 1213 - DNA, 20 bp, synthetic construct
  source 1..20: mol_type = other DNA
ggcctcacccgtaagggatg

SEQ ID NO: 1214 - DNA, 20 bp, synthetic construct
  source 1..20: mol_type = other DNA
catcccttacgggtgaggta

SEQ ID NO: 1215 - DNA, 20 bp, synthetic construct
  source 1..20: mol_type = other DNA
tacctcacccgtaagggatg

SEQ ID NO: 1216 - DNA, 20 bp, synthetic construct
  source 1..20: mol_type = other DNA
catcccttacgggtgaggtc

SEQ ID NO: 1217 - DNA, 20 bp, synthetic construct
  source 1..20: mol_type = other DNA
gacctcacccgtaagggatg

SEQ ID NO: 1218 - DNA, 20 bp, synthetic construct
  source 1..20: mol_type = other DNA
catcccttacgggtgagtca

SEQ ID NO: 1219 - DNA, 20 bp, synthetic construct
  source 1..20: mol_type = other DNA
tgactcacccgtaagggatg

SEQ ID NO: 1220 - DNA, 20 bp, synthetic construct
  source 1..20: mol_type = other DNA
catcccttacgggtgagtcc

SEQ ID NO: 1221 - DNA, 20 bp, synthetic construct
  source 1..20: mol_type = other DNA
ggactcacccgtaagggatg

SEQ ID NO: 1222 - DNA, 20 bp, synthetic construct
  source 1..20: mol_type = other DNA
catcccttacgggtgagtta

SEQ ID NO: 1223 - DNA, 20 bp, synthetic construct
  source 1..20: mol_type = other DNA
taactcacccgtaagggatg

SEQ ID NO: 1224 - DNA, 20 bp, synthetic construct
  source 1..20: mol_type = other DNA
catcccttacgggtgagttc

SEQ ID NO: 1225 - DNA, 20 bp, synthetic construct
  source 1..20: mol_type = other DNA
gaactcacccgtaagggatg

SEQ ID NO: 1226 - DNA, 20 bp, synthetic construct
  source 1..20: mol_type = other DNA
catcccttacgggtgacgca

SEQ ID NO: 1227 - DNA, 20 bp, synthetic construct
  source 1..20: mol_type = other DNA
tgcgtcacccgtaagggatg

SEQ ID NO: 1228 - DNA, 20 bp, synthetic construct
  source 1..20: mol_type = other DNA
catcccttacgggtgacgcc

SEQ ID NO: 1229 - DNA, 20 bp, synthetic construct
  source 1..20: mol_type = other DNA
ggcgtcacccgtaagggatg

SEQ ID NO: 1230 - DNA, 20 bp, synthetic construct
  source 1..20: mol_type = other DNA
catcccttacgggtgacgta

SEQ ID NO: 1231 - DNA, 20 bp, synthetic construct
  source 1..20: mol_type = other DNA
tacgtcacccgtaagggatg

SEQ ID NO: 1232 - DNA, 20 bp, synthetic construct
  source 1..20: mol_type = other DNA
catcccttacgggtgacgtc

SEQ ID NO: 1233 - DNA, 20 bp, synthetic construct
  source 1..20: mol_type = other DNA
gacgtcacccgtaagggatg

SEQ ID NO: 1234 - DNA, 20 bp, synthetic construct
  source 1..20: mol_type = other DNA
catcccttacgggtgactca

SEQ ID NO: 1235 - DNA, 20 bp, synthetic construct
  source 1..20: mol_type = other DNA
tgagtcacccgtaagggatg

SEQ ID NO: 1236 - DNA, 20 bp, synthetic construct
  source 1..20: mol_type = other DNA
catcccttacgggtgactcc

SEQ ID NO: 1237 - DNA, 20 bp, synthetic construct
  source 1..20: mol_type = other DNA
ggagtcacccgtaagggatg

SEQ ID NO: 1238 - DNA, 20 bp, synthetic construct
  source 1..20: mol_type = other DNA
catcccttacgggtgactta

SEQ ID NO: 1239 - DNA, 20 bp, synthetic construct
  source 1..20: mol_type = other DNA
taagtcacccgtaagggatg

SEQ ID NO: 1240 - DNA, 20 bp, synthetic construct
  source 1..20: mol_type = other DNA
catcccttacgggtgacttc

SEQ ID NO: 1241 - DNA, 20 bp, synthetic construct
  source 1..20: mol_type = other DNA
gaagtcacccgtaagggatg

SEQ ID NO: 1242-1243 - skipped (2 entries)

SEQ ID NO: 1244 - DNA, 11 bp, synthetic construct
  source 1..11: mol_type = other DNA
cctgtcaatca

SEQ ID NO: 1245 - DNA, 11 bp, synthetic construct
  source 1..11: mol_type = other DNA
tgattgacagg

SEQ ID NO: 1246 - DNA, 11 bp, synthetic construct
  source 1..11: mol_type = other DNA
gaccacccaag

SEQ ID NO: 1247 - DNA, 11 bp, synthetic construct
  source 1..11: mol_type = other DNA
cttgggtggtc

SEQ ID NO: 1248 - DNA, 11 bp, synthetic construct
  source 1..11: mol_type = other DNA
gaccacccacg

SEQ ID NO: 1249 - DNA, 11 bp, synthetic construct
  source 1..11: mol_type = other DNA
cgtgggtggtc

SEQ ID NO: 1250 - DNA, 19 bp, synthetic construct
  source 1..19: mol_type = other DNA
aagtgctgagtcagcagaa

SEQ ID NO: 1251 - DNA, 19 bp, synthetic construct
  source 1..19: mol_type = other DNA
ttctgctgactcagcactt

SEQ ID NO: 1252 - DNA, 19 bp, synthetic construct
  source 1..19: mol_type = other DNA
aagtgctgagtcagcagat

SEQ ID NO: 1253 - DNA, 19 bp, synthetic construct
  source 1..19: mol_type = other DNA
atctgctgactcagcactt

SEQ ID NO: 1254 - DNA, 19 bp, synthetic construct
  source 1..19: mol_type = other DNA
aagtgctgagtcagcagta

SEQ ID NO: 1255 - DNA, 19 bp, synthetic construct
  source 1..19: mol_type = other DNA
tactgctgactcagcactt

SEQ ID NO: 1256 - DNA, 19 bp, synthetic construct
  source 1..19: mol_type = other DNA
aagtgctgagtcagcagtt

SEQ ID NO: 1257 - DNA, 19 bp, synthetic construct
  source 1..19: mol_type = other DNA
aactgctgactcagcactt

SEQ ID NO: 1258 - DNA, 19 bp, synthetic construct
  source 1..19: mol_type = other DNA
aagtgctgactcagcagaa

SEQ ID NO: 1259 - DNA, 19 bp, synthetic construct
  source 1..19: mol_type = other DNA
ttctgctgagtcagcactt

SEQ ID NO: 1260 - DNA, 19 bp, synthetic construct
  source 1..19: mol_type = other DNA
aagtgctgactcagcagat

SEQ ID NO: 1261 - DNA, 19 bp, synthetic construct
  source 1..19: mol_type = other DNA
atctgctgagtcagcactt

SEQ ID NO: 1262 - DNA, 19 bp, synthetic construct
  source 1..19: mol_type = other DNA
aagtgctgactcagcagta

SEQ ID NO: 1263 - DNA, 19 bp, synthetic construct
  source 1..19: mol_type = other DNA
tactgctgagtcagcactt

SEQ ID NO: 1264 - DNA, 19 bp, synthetic construct
  source 1..19: mol_type = other DNA
aagtgctgactcagcagtt

SEQ ID NO: 1265 - DNA, 19 bp, synthetic construct
  source 1..19: mol_type = other DNA
aactgctgagtcagcactt

SEQ ID NO: 1266 - DNA, 19 bp, synthetic construct
  source 1..19: mol_type = other DNA
atgtgctgagtcagcagaa

SEQ ID NO: 1267 - DNA, 19 bp, synthetic construct
  source 1..19: mol_type = other DNA
ttctgctgactcagcacat

SEQ ID NO: 1268 - DNA, 19 bp, synthetic construct
  source 1..19: mol_type = other DNA
atgtgctgagtcagcagat

SEQ ID NO: 1269 - DNA, 19 bp, synthetic construct
  source 1..19: mol_type = other DNA
atctgctgactcagcacat

SEQ ID NO: 1270 - DNA, 19 bp, synthetic construct
  source 1..19: mol_type = other DNA
atgtgctgagtcagcagta

SEQ ID NO: 1271 - DNA, 19 bp, synthetic construct
  source 1..19: mol_type = other DNA
tactgctgactcagcacat

SEQ ID NO: 1272 - DNA, 19 bp, synthetic construct
  source 1..19: mol_type = other DNA
atgtgctgagtcagcagtt

SEQ ID NO: 1273 - DNA, 19 bp, synthetic construct
  source 1..19: mol_type = other DNA
aactgctgactcagcacat

SEQ ID NO: 1274 - DNA, 19 bp, synthetic construct
  source 1..19: mol_type = other DNA
atgtgctgactcagcagaa

SEQ ID NO: 1275 - DNA, 19 bp, synthetic construct
  source 1..19: mol_type = other DNA
ttctgctgagtcagcacat

SEQ ID NO: 1276 - DNA, 19 bp, synthetic construct
  source 1..19: mol_type = other DNA
atgtgctgactcagcagat

SEQ ID NO: 1277 - DNA, 19 bp, synthetic construct
  source 1..19: mol_type = other DNA
atctgctgagtcagcacat

SEQ ID NO: 1278 - DNA, 19 bp, synthetic construct
  source 1..19: mol_type = other DNA
atgtgctgactcagcagta

SEQ ID NO: 1279 - DNA, 19 bp, synthetic construct
  source 1..19: mol_type = other DNA
tactgctgagtcagcacat

SEQ ID NO: 1280 - DNA, 19 bp, synthetic construct
  source 1..19: mol_type = other DNA
atgtgctgactcagcagtt

SEQ ID NO: 1281 - DNA, 19 bp, synthetic construct
  source 1..19: mol_type = other DNA
aactgctgagtcagcacat

SEQ ID NO: 1282 - DNA, 19 bp, synthetic construct
  source 1..19: mol_type = other DNA
tagtgctgagtcagcagaa

SEQ ID NO: 1283 - DNA, 19 bp, synthetic construct
  source 1..19: mol_type = other DNA
ttctgctgactcagcacta

SEQ ID NO: 1284 - DNA, 19 bp, synthetic construct
  source 1..19: mol_type = other DNA
tagtgctgagtcagcagat

SEQ ID NO: 1285 - DNA, 19 bp, synthetic construct
  source 1..19: mol_type = other DNA
atctgctgactcagcacta

SEQ ID NO: 1286 - DNA, 19 bp, synthetic construct
  source 1..19: mol_type = other DNA
tagtgctgagtcagcagta

SEQ ID NO: 1287 - DNA, 19 bp, synthetic construct
  source 1..19: mol_type = other DNA
tactgctgactcagcacta

SEQ ID NO: 1288 - DNA, 19 bp, synthetic construct
  source 1..19: mol_type = other DNA
tagtgctgagtcagcagtt

SEQ ID NO: 1289 - DNA, 19 bp, synthetic construct
  source 1..19: mol_type = other DNA
aactgctgactcagcacta

SEQ ID NO: 1290 - DNA, 19 bp, synthetic construct
  source 1..19: mol_type = other DNA
tagtgctgactcagcagaa

SEQ ID NO: 1291 - DNA, 19 bp, synthetic construct
  source 1..19: mol_type = other DNA
ttctgctgagtcagcacta

SEQ ID NO: 1292 - DNA, 19 bp, synthetic construct
  source 1..19: mol_type = other DNA
tagtgctgactcagcagat

SEQ ID NO: 1293 - DNA, 19 bp, synthetic construct
  source 1..19: mol_type = other DNA
atctgctgagtcagcacta

SEQ ID NO: 1294 - DNA, 19 bp, synthetic construct
  source 1..19: mol_type = other DNA
tagtgctgactcagcagta

SEQ ID NO: 1295 - DNA, 19 bp, synthetic construct
  source 1..19: mol_type = other DNA
tactgctgagtcagcacta

SEQ ID NO: 1296 - DNA, 19 bp, synthetic construct
  source 1..19: mol_type = other DNA
tagtgctgactcagcagtt

SEQ ID NO: 1297 - DNA, 19 bp, synthetic construct
  source 1..19: mol_type = other DNA
aactgctgagtcagcacta

SEQ ID NO: 1298 - DNA, 19 bp, synthetic construct
  source 1..19: mol_type = other DNA
ttgtgctgagtcagcagaa

SEQ ID NO: 1299 - DNA, 19 bp, synthetic construct
  source 1..19: mol_type = other DNA
ttctgctgactcagcacaa

SEQ ID NO: 1300 - DNA, 19 bp, synthetic construct
  source 1..19: mol_type = other DNA
ttgtgctgagtcagcagat

SEQ ID NO: 1301 - DNA, 19 bp, synthetic construct
  source 1..19: mol_type = other DNA
atctgctgactcagcacaa

SEQ ID NO: 1302 - DNA, 19 bp, synthetic construct
  source 1..19: mol_type = other DNA
ttgtgctgagtcagcagta

SEQ ID NO: 1303 - DNA, 19 bp, synthetic construct
  source 1..19: mol_type = other DNA
tactgctgactcagcacaa

SEQ ID NO: 1304 - DNA, 19 bp, synthetic construct
  source 1..19: mol_type = other DNA
ttgtgctgagtcagcagtt

SEQ ID NO: 1305 - DNA, 19 bp, synthetic construct
  source 1..19: mol_type = other DNA
aactgctgactcagcacaa

SEQ ID NO: 1306 - DNA, 19 bp, synthetic construct
  source 1..19: mol_type = other DNA
ttgtgctgactcagcagaa

SEQ ID NO: 1307 - DNA, 19 bp, synthetic construct
  source 1..19: mol_type = other DNA
ttctgctgagtcagcacaa

SEQ ID NO: 1308 - DNA, 19 bp, synthetic construct
  source 1..19: mol_type = other DNA
ttgtgctgactcagcagat

SEQ ID NO: 1309 - DNA, 19 bp, synthetic construct
  source 1..19: mol_type = other DNA
atctgctgagtcagcacaa

SEQ ID NO: 1310 - DNA, 19 bp, synthetic construct
  source 1..19: mol_type = other DNA
ttgtgctgactcagcagta

SEQ ID NO: 1311 - DNA, 19 bp, synthetic construct
  source 1..19: mol_type = other DNA
tactgctgagtcagcacaa

SEQ ID NO: 1312 - DNA, 19 bp, synthetic construct
  source 1..19: mol_type = other DNA
ttgtgctgactcagcagtt

SEQ ID NO: 1313 - DNA, 19 bp, synthetic construct
  source 1..19: mol_type = other DNA
aactgctgagtcagcacaa

SEQ ID NO: 1314 - DNA, 10 bp, synthetic construct
  source 1..10: mol_type = other DNA
tgctgactca

SEQ ID NO: 1315 - DNA, 10 bp, synthetic construct
  source 1..10: mol_type = other DNA
tgagtcagca

SEQ ID NO: 1316 - DNA, 11 bp, synthetic construct
  source 1..11: mol_type = other DNA
gatgacgtcac

SEQ ID NO: 1317 - DNA, 11 bp, synthetic construct
  source 1..11: mol_type = other DNA
gtgacgtcatc

SEQ ID NO: 1318 - DNA, 11 bp, synthetic construct
  source 1..11: mol_type = other DNA
gatgacgtcat

SEQ ID NO: 1319 - DNA, 11 bp, synthetic construct
  source 1..11: mol_type = other DNA
atgacgtcatc

SEQ ID NO: 1320 - DNA, 11 bp, synthetic construct
  source 1..11: mol_type = other DNA
ggtgacgtcac

SEQ ID NO: 1321 - DNA, 11 bp, synthetic construct
  source 1..11: mol_type = other DNA
gtgacgtcacc

SEQ ID NO: 1322 - DNA, 11 bp, synthetic construct
  source 1..11: mol_type = other DNA
ggtgacgtcat

SEQ ID NO: 1323 - DNA, 11 bp, synthetic construct
  source 1..11: mol_type = other DNA
atgacgtcacc

SEQ ID NO: 1324 - DNA, 10 bp, synthetic construct
  source 1..10: mol_type = other DNA
ggtcgtaaaa

SEQ ID NO: 1325 - DNA, 10 bp, synthetic construct
  source 1..10: mol_type = other DNA
ttttacgacc

SEQ ID NO: 1326 - DNA, 12 bp, synthetic construct
  source 1..12: mol_type = other DNA
aggtctctaacc

SEQ ID NO: 1327 - DNA, 12 bp, synthetic construct
  source 1..12: mol_type = other DNA
ggttagagacct

SEQ ID NO: 1328-1335 - skipped (8 entries)

SEQ ID NO: 1336 - DNA, 20 bp, synthetic construct
  source 1..20: mol_type = other DNA
cggcccttttatgaccaggc

SEQ ID NO: 1337 - DNA, 20 bp, synthetic construct
  source 1..20: mol_type = other DNA
gcctggtcataaaagggccg

SEQ ID NO: 1338 - DNA, 20 bp, synthetic construct
  source 1..20: mol_type = other DNA
cggcccttttttgaccaggc

SEQ ID NO: 1339 - DNA, 20 bp, synthetic construct
  source 1..20: mol_type = other DNA
gcctggtcaaaaaagggccg

SEQ ID NO: 1340 - DNA, 20 bp, synthetic construct
  source 1..20: mol_type = other DNA
cggcctttttatgaccaggc

SEQ ID NO: 1341 - DNA, 20 bp, synthetic construct
  source 1..20: mol_type = other DNA
gcctggtcataaaaaggccg

SEQ ID NO: 1342 - DNA, 20 bp, synthetic construct
  source 1..20: mol_type = other DNA
cggcctttttttgaccaggc

SEQ ID NO: 1343 - DNA, 20 bp, synthetic construct
  source 1..20: mol_type = other DNA
gcctggtcaaaaaaaggccg

SEQ ID NO: 1344 - DNA, 20 bp, synthetic construct
  source 1..20: mol_type = other DNA
cggctcttttatgaccaggc

SEQ ID NO: 1345 - DNA, 20 bp, synthetic construct
  source 1..20: mol_type = other DNA
gcctggtcataaaagagccg

SEQ ID NO: 1346 - DNA, 20 bp, synthetic construct
  source 1..20: mol_type = other DNA
cggctcttttttgaccaggc

SEQ ID NO: 1347 - DNA, 20 bp, synthetic construct
  source 1..20: mol_type = other DNA
gcctggtcaaaaaagagccg

SEQ ID NO: 1348 - DNA, 20 bp, synthetic construct
  source 1..20: mol_type = other DNA
cggcttttttatgaccaggc

SEQ ID NO: 1349 - DNA, 20 bp, synthetic construct
  source 1..20: mol_type = other DNA
gcctggtcataaaaaagccg

SEQ ID NO: 1350 - DNA, 20 bp, synthetic construct
  source 1..20: mol_type = other DNA
cggcttttttttgaccaggc

SEQ ID NO: 1351 - DNA, 20 bp, synthetic construct
  source 1..20: mol_type = other DNA
gcctggtcaaaaaaaagccg

SEQ ID NO: 1352 - DNA, 12 bp, synthetic construct
  source 1..12: mol_type = other DNA
gtgcgcatgcgc

SEQ ID NO: 1353 - DNA, 12 bp, synthetic construct
  source 1..12: mol_type = other DNA
gcgcatgcgcac

SEQ ID NO: 1354 - DNA, 10 bp, synthetic construct
  source 1..10: mol_type = other DNA
atgacgtcac

SEQ ID NO: 1355 - DNA, 10 bp, synthetic construct
  source 1..10: mol_type = other DNA
gtgacgtcat

SEQ ID NO: 1356 - DNA, 10 bp, synthetic construct
  source 1..10: mol_type = other DNA
atgacgtcat

SEQ ID NO: 1357 - DNA, 10 bp, synthetic construct
  source 1..10: mol_type = other DNA
atgacgtcat

SEQ ID NO: 1358 - DNA, 10 bp, synthetic construct
  source 1..10: mol_type = other DNA
gtgacgtcac

SEQ ID NO: 1359 - DNA, 10 bp, synthetic construct
  source 1..10: mol_type = other DNA
gtgacgtcac

SEQ ID NO: 1360 - DNA, 10 bp, synthetic construct
  source 1..10: mol_type = other DNA
gtgacgtcat

SEQ ID NO: 1361 - DNA, 10 bp, synthetic construct
  source 1..10: mol_type = other DNA
atgacgtcac

SEQ ID NO: 1362 - DNA, 12 bp, synthetic construct
  source 1..12: mol_type = other DNA
gatgactcagca

SEQ ID NO: 1363 - DNA, 12 bp, synthetic construct
  source 1..12: mol_type = other DNA
tgctgagtcatc

SEQ ID NO: 1364-1375 - skipped (12 entries)

SEQ ID NO: 1376 - DNA, 18 bp, synthetic construct
  source 1..18: mol_type = other DNA
gtgccattgagacagcac

SEQ ID NO: 1377 - DNA, 18 bp, synthetic construct
  source 1..18: mol_type = other DNA
gtgctgtctcaatggcac

SEQ ID NO: 1378 - DNA, 18 bp, synthetic construct
  source 1..18: mol_type = other DNA
gtgccattgagatagcac

SEQ ID NO: 1379 - DNA, 18 bp, synthetic construct
  source 1..18: mol_type = other DNA
gtgctatctcaatggcac

SEQ ID NO: 1380 - DNA, 14 bp, synthetic construct
  source 1..14: mol_type = other DNA
atgactcagcataa

SEQ ID NO: 1381 - DNA, 14 bp, synthetic construct
  source 1..14: mol_type = other DNA
ttatgctgagtcat

SEQ ID NO: 1382 - DNA, 14 bp, synthetic construct
  source 1..14: mol_type = other DNA
atgactcagcatat

SEQ ID NO: 1383 - DNA, 14 bp, synthetic construct
  source 1..14: mol_type = other DNA
atatgctgagtcat

SEQ ID NO: 1384 - DNA, 14 bp, synthetic construct
  source 1..14: mol_type = other DNA
atgactcagcatta

SEQ ID NO: 1385 - DNA, 14 bp, synthetic construct
  source 1..14: mol_type = other DNA
taatgctgagtcat

SEQ ID NO: 1386 - DNA, 14 bp, synthetic construct
  source 1..14: mol_type = other DNA
atgactcagcattt

SEQ ID NO: 1387 - DNA, 14 bp, synthetic construct
  source 1..14: mol_type = other DNA
aaatgctgagtcat

SEQ ID NO: 1388 - DNA, 20 bp, synthetic construct
  source 1..20: mol_type = other DNA
cggctgccgtggtcagataa

SEQ ID NO: 1389 - DNA, 20 bp, synthetic construct
  source 1..20: mol_type = other DNA
ttatctgaccacggcagccg

SEQ ID NO: 1390 - DNA, 14 bp, synthetic construct
  source 1..14: mol_type = other DNA
aaggtcaaaggtca

SEQ ID NO: 1391 - DNA, 14 bp, synthetic construct
  source 1..14: mol_type = other DNA
tgacctttgacctt

SEQ ID NO: 1392 - DNA, 14 bp, synthetic construct
  source 1..14: mol_type = other DNA
agggtcaaaggtca

SEQ ID NO: 1393 - DNA, 14 bp, synthetic construct
  source 1..14: mol_type = other DNA
tgacctttgaccct

SEQ ID NO: 1394 - DNA, 14 bp, synthetic construct
  source 1..14: mol_type = other DNA
gaggtcaaaggtca

SEQ ID NO: 1395 - DNA, 14 bp, synthetic construct
  source 1..14: mol_type = other DNA
tgacctttgacctc

SEQ ID NO: 1396 - DNA, 14 bp, synthetic construct
  source 1..14: mol_type = other DNA
ggggtcaaaggtca

SEQ ID NO: 1397 - DNA, 14 bp, synthetic construct
  source 1..14: mol_type = other DNA
tgacctttgacccc

SEQ ID NO: 1398 - DNA, 10 bp, synthetic construct
  source 1..10: mol_type = other DNA
actgaaacca

SEQ ID NO: 1399 - DNA, 10 bp, synthetic construct
  source 1..10: mol_type = other DNA
tggtttcagt

SEQ ID NO: 1400 - DNA, 11 bp, synthetic construct
  source 1..11: mol_type = other DNA
aaccggatgta

SEQ ID NO: 1401 - DNA, 11 bp, synthetic construct
  source 1..11: mol_type = other DNA
tacatccggtt

SEQ ID NO: 1402 - DNA, 11 bp, synthetic construct
  source 1..11: mol_type = other DNA
aaccggatgtt

SEQ ID NO: 1403 - DNA, 11 bp, synthetic construct
  source 1..11: mol_type = other DNA
aacatccggtt

SEQ ID NO: 1404 - DNA, 11 bp, synthetic construct
  source 1..11: mol_type = other DNA
acccggatgta

SEQ ID NO: 1405 - DNA, 11 bp, synthetic construct
  source 1..11: mol_type = other DNA
tacatccgggt

SEQ ID NO: 1406 - DNA, 11 bp, synthetic construct
  source 1..11: mol_type = other DNA
acccggatgtt

SEQ ID NO: 1407 - DNA, 11 bp, synthetic construct
  source 1..11: mol_type = other DNA
aacatccgggt

SEQ ID NO: 1408 - DNA, 17 bp, synthetic construct
  source 1..17: mol_type = other DNA
agtttcactatgactga

SEQ ID NO: 1409 - DNA, 17 bp, synthetic construct
  source 1..17: mol_type = other DNA
tcagtcatagtgaaact

SEQ ID NO: 1410 - DNA, 17 bp, synthetic construct
  source 1..17: mol_type = other DNA
agtttcactatgactgt

SEQ ID NO: 1411 - DNA, 17 bp, synthetic construct
  source 1..17: mol_type = other DNA
acagtcatagtgaaact

SEQ ID NO: 1412 - DNA, 17 bp, synthetic construct
  source 1..17: mol_type = other DNA
agtttcactctgactga

SEQ ID NO: 1413 - DNA, 17 bp, synthetic construct
  source 1..17: mol_type = other DNA
tcagtcagagtgaaact

SEQ ID NO: 1414 - DNA, 17 bp, synthetic construct
  source 1..17: mol_type = other DNA
agtttcactctgactgt

SEQ ID NO: 1415 - DNA, 17 bp, synthetic construct
  source 1..17: mol_type = other DNA
acagtcagagtgaaact

SEQ ID NO: 1416 - DNA, 17 bp, synthetic construct
  source 1..17: mol_type = other DNA
agtttcactttgactga

SEQ ID NO: 1417 - DNA, 17 bp, synthetic construct
  source 1..17: mol_type = other DNA
tcagtcaaagtgaaact

SEQ ID NO: 1418 - DNA, 17 bp, synthetic construct
  source 1..17: mol_type = other DNA
agtttcactttgactgt

SEQ ID NO: 1419 - DNA, 17 bp, synthetic construct
  source 1..17: mol_type = other DNA
acagtcaaagtgaaact

SEQ ID NO: 1420 - DNA, 17 bp, synthetic construct
  source 1..17: mol_type = other DNA
agtttcagtatgactga

SEQ ID NO: 1421 - DNA, 17 bp, synthetic construct
  source 1..17: mol_type = other DNA
tcagtcatactgaaact

SEQ ID NO: 1422 - DNA, 17 bp, synthetic construct
  source 1..17: mol_type = other DNA
agtttcagtatgactgt

SEQ ID NO: 1423 - DNA, 17 bp, synthetic construct
  source 1..17: mol_type = other DNA
acagtcatactgaaact

SEQ ID NO: 1424 - DNA, 17 bp, synthetic construct
  source 1..17: mol_type = other DNA
agtttcagtctgactga

SEQ ID NO: 1425 - DNA, 17 bp, synthetic construct
  source 1..17: mol_type = other DNA
tcagtcagactgaaact

SEQ ID NO: 1426 - DNA, 17 bp, synthetic construct
  source 1..17: mol_type = other DNA
agtttcagtctgactgt

SEQ ID NO: 1427 - DNA, 17 bp, synthetic construct
  source 1..17: mol_type = other DNA
acagtcagactgaaact

SEQ ID NO: 1428 - DNA, 17 bp, synthetic construct
  source 1..17: mol_type = other DNA
agtttcagtttgactga

SEQ ID NO: 1429 - DNA, 17 bp, synthetic construct
  source 1..17: mol_type = other DNA
tcagtcaaactgaaact

SEQ ID NO: 1430 - DNA, 17 bp, synthetic construct
  source 1..17: mol_type = other DNA
agtttcagtttgactgt

SEQ ID NO: 1431 - DNA, 17 bp, synthetic construct
  source 1..17: mol_type = other DNA
acagtcaaactgaaact

SEQ ID NO: 1432 - DNA, 17 bp, synthetic construct
  source 1..17: mol_type = other DNA
agtttcattatgactga

SEQ ID NO: 1433 - DNA, 17 bp, synthetic construct
  source 1..17: mol_type = other DNA
tcagtcataatgaaact

SEQ ID NO: 1434 - DNA, 17 bp, synthetic construct
  source 1..17: mol_type = other DNA
agtttcattatgactgt

SEQ ID NO: 1435 - DNA, 17 bp, synthetic construct
  source 1..17: mol_type = other DNA
acagtcataatgaaact

SEQ ID NO: 1436 - DNA, 17 bp, synthetic construct
  source 1..17: mol_type = other DNA
agtttcattctgactga

SEQ ID NO: 1437 - DNA, 17 bp, synthetic construct
  source 1..17: mol_type = other DNA
tcagtcagaatgaaact

SEQ ID NO: 1438 - DNA, 17 bp, synthetic construct
  source 1..17: mol_type = other DNA
agtttcattctgactgt

SEQ ID NO: 1439 - DNA, 17 bp, synthetic construct
  source 1..17: mol_type = other DNA
acagtcagaatgaaact

SEQ ID NO: 1440 - DNA, 17 bp, synthetic construct
  source 1..17: mol_type = other DNA
agtttcattttgactga

SEQ ID NO: 1441 - DNA, 17 bp, synthetic construct
  source 1..17: mol_type = other DNA
tcagtcaaaatgaaact

SEQ ID NO: 1442 - DNA, 17 bp, synthetic construct
  source 1..17: mol_type = other DNA
agtttcattttgactgt

SEQ ID NO: 1443 - DNA, 17 bp, synthetic construct
  source 1..17: mol_type = other DNA
acagtcaaaatgaaact

SEQ ID NO: 1444-1455 - skipped (12 entries)

SEQ ID NO: 1456 - DNA, 10 bp, synthetic construct
  source 1..10: mol_type = other DNA
gccccaccca

SEQ ID NO: 1457 - DNA, 10 bp, synthetic construct
  source 1..10: mol_type = other DNA
tgggtggggc

SEQ ID NO: 1458 - DNA, 10 bp, synthetic construct
  source 1..10: mol_type = other DNA
gccccacccc

SEQ ID NO: 1459 - DNA, 10 bp, synthetic construct
  source 1..10: mol_type = other DNA
ggggtggggc

SEQ ID NO: 1460 - DNA, 10 bp, synthetic construct
  source 1..10: mol_type = other DNA
gccccaccct

SEQ ID NO: 1461 - DNA, 10 bp, synthetic construct
  source 1..10: mol_type = other DNA
agggtggggc

SEQ ID NO: 1462 - DNA, 10 bp, synthetic construct
  source 1..10: mol_type = other DNA
gccccgccca

SEQ ID NO: 1463 - DNA, 10 bp, synthetic construct
  source 1..10: mol_type = other DNA
tgggcggggc

SEQ ID NO: 1464 - DNA, 10 bp, synthetic construct
  source 1..10: mol_type = other DNA
gccccgcccc

SEQ ID NO: 1465 - DNA, 10 bp, synthetic construct
  source 1..10: mol_type = other DNA
ggggcggggc

SEQ ID NO: 1466 - DNA, 10 bp, synthetic construct
  source 1..10: mol_type = other DNA
gccccgccct

SEQ ID NO: 1467 - DNA, 10 bp, synthetic construct
  source 1..10: mol_type = other DNA
agggcggggc

SEQ ID NO: 1468-1469 - skipped (2 entries)

SEQ ID NO: 1470 - DNA, 10 bp, synthetic construct
  source 1..10: mol_type = other DNA
tggcagttgg

SEQ ID NO: 1471 - DNA, 10 bp, synthetic construct
  source 1..10: mol_type = other DNA
ccaactgcca

SEQ ID NO: 1472 - DNA, 12 bp, synthetic construct
  source 1..12: mol_type = other DNA
gggggtgtgtcc

SEQ ID NO: 1473 - DNA, 12 bp, synthetic construct
  source 1..12: mol_type = other DNA
ggacacaccccc

SEQ ID NO: 1474 - DNA, 15 bp, synthetic construct
  source 1..15: mol_type = other DNA
tgctgactcagcaaa

SEQ ID NO: 1475 - DNA, 15 bp, synthetic construct
  source 1..15: mol_type = other DNA
tttgctgagtcagca

SEQ ID NO: 1476 - DNA, 15 bp, synthetic construct
  source 1..15: mol_type = other DNA
tgctgactcagcaat

SEQ ID NO: 1477 - DNA, 15 bp, synthetic construct
  source 1..15: mol_type = other DNA
attgctgagtcagca

SEQ ID NO: 1478 - DNA, 12 bp, synthetic construct
  source 1..12: mol_type = other DNA
agccggaagcgg

SEQ ID NO: 1479 - DNA, 12 bp, synthetic construct
  source 1..12: mol_type = other DNA
ccgcttccggct

SEQ ID NO: 1480 - DNA, 12 bp, synthetic construct
  source 1..12: mol_type = other DNA
agccggaagcgc

SEQ ID NO: 1481 - DNA, 12 bp, synthetic construct
  source 1..12: mol_type = other DNA
gcgcttccggct

SEQ ID NO: 1482 - DNA, 12 bp, synthetic construct
  source 1..12: mol_type = other DNA
agccggaagtgg

SEQ ID NO: 1483 - DNA, 12 bp, synthetic construct
  source 1..12: mol_type = other DNA
ccacttccggct

SEQ ID NO: 1484 - DNA, 12 bp, synthetic construct
  source 1..12: mol_type = other DNA
agccggaagtgc

SEQ ID NO: 1485 - DNA, 12 bp, synthetic construct
  source 1..12: mol_type = other DNA
gcacttccggct

SEQ ID NO: 1486 - DNA, 12 bp, synthetic construct
  source 1..12: mol_type = other DNA
acccggaagcgg

SEQ ID NO: 1487 - DNA, 12 bp, synthetic construct
  source 1..12: mol_type = other DNA
ccgcttccgggt

SEQ ID NO: 1488 - DNA, 12 bp, synthetic construct
  source 1..12: mol_type = other DNA
acccggaagcgc

SEQ ID NO: 1489 - DNA, 12 bp, synthetic construct
  source 1..12: mol_type = other DNA
gcgcttccgggt

SEQ ID NO: 1490 - DNA, 12 bp, synthetic construct
  source 1..12: mol_type = other DNA
acccggaagtgg

SEQ ID NO: 1491 - DNA, 12 bp, synthetic construct
  source 1..12: mol_type = other DNA
ccacttccgggt

SEQ ID NO: 1492 - DNA, 12 bp, synthetic construct
  source 1..12: mol_type = other DNA
acccggaagtgc

SEQ ID NO: 1493 - DNA, 12 bp, synthetic construct
  source 1..12: mol_type = other DNA
gcacttccgggt

SEQ ID NO: 1494 - DNA, 14 bp, synthetic construct
  source 1..14: mol_type = other DNA
aaggtcaaaggtca

SEQ ID NO: 1495 - DNA, 14 bp, synthetic construct
  source 1..14: mol_type = other DNA
tgacctttgacctt

SEQ ID NO: 1496 - DNA, 14 bp, synthetic construct
  source 1..14: mol_type = other DNA
agggtcaaaggtca

SEQ ID NO: 1497 - DNA, 14 bp, synthetic construct
  source 1..14: mol_type = other DNA
tgacctttgaccct

SEQ ID NO: 1498 - DNA, 14 bp, synthetic construct
  source 1..14: mol_type = other DNA
gaggtcaaaggtca

SEQ ID NO: 1499 - DNA, 14 bp, synthetic construct
  source 1..14: mol_type = other DNA
tgacctttgacctc

SEQ ID NO: 1500 - DNA, 14 bp, synthetic construct
  source 1..14: mol_type = other DNA
ggggtcaaaggtca

SEQ ID NO: 1501 - DNA, 14 bp, synthetic construct
  source 1..14: mol_type = other DNA
tgacctttgacccc

SEQ ID NO: 1502-1503 - skipped (2 entries)

SEQ ID NO: 1504 - DNA, 12 bp, synthetic construct
  source 1..12: mol_type = other DNA
aaaaaccccaga

SEQ ID NO: 1505 - DNA, 12 bp, synthetic construct
  source 1..12: mol_type = other DNA
tctggggttttt

SEQ ID NO: 1506 - DNA, 12 bp, synthetic construct
  source 1..12: mol_type = other DNA
aaaagccccaga

SEQ ID NO: 1507 - DNA, 12 bp, synthetic construct
  source 1..12: mol_type = other DNA
tctggggctttt

SEQ ID NO: 1508-1517 - skipped (10 entries)

SEQ ID NO: 1518 - DNA, 15 bp, synthetic construct
  source 1..15: mol_type = other DNA
aaaatgctgagtcat

SEQ ID NO: 1519 - DNA, 15 bp, synthetic construct
  source 1..15: mol_type = other DNA
atgactcagcatttt

SEQ ID NO: 1520 - DNA, 15 bp, synthetic construct
  source 1..15: mol_type = other DNA
aatatgctgagtcat

SEQ ID NO: 1521 - DNA, 15 bp, synthetic construct
  source 1..15: mol_type = other DNA
atgactcagcatatt

SEQ ID NO: 1522 - DNA, 15 bp, synthetic construct
  source 1..15: mol_type = other DNA
ataatgctgagtcat

SEQ ID NO: 1523 - DNA, 15 bp, synthetic construct
  source 1..15: mol_type = other DNA
atgactcagcattat

SEQ ID NO: 1524 - DNA, 15 bp, synthetic construct
  source 1..15: mol_type = other DNA
attatgctgagtcat

SEQ ID NO: 1525 - DNA, 15 bp, synthetic construct
  source 1..15: mol_type = other DNA
atgactcagcataat

SEQ ID NO: 1526 - DNA, 13 bp, synthetic construct
  source 1..13: mol_type = other DNA
aatatgcaaatta

SEQ ID NO: 1527 - DNA, 13 bp, synthetic construct
  source 1..13: mol_type = other DNA
taatttgcatatt

SEQ ID NO: 1528 - DNA, 13 bp, synthetic construct
  source 1..13: mol_type = other DNA
aatatgcaaattt

SEQ ID NO: 1529 - DNA, 13 bp, synthetic construct
  source 1..13: mol_type = other DNA
aaatttgcatatt

SEQ ID NO: 1530 - DNA, 13 bp, synthetic construct
  source 1..13: mol_type = other DNA
aatatgctaatta

SEQ ID NO: 1531 - DNA, 13 bp, synthetic construct
  source 1..13: mol_type = other DNA
taattagcatatt

SEQ ID NO: 1532 - DNA, 13 bp, synthetic construct
  source 1..13: mol_type = other DNA
aatatgctaattt

SEQ ID NO: 1533 - DNA, 13 bp, synthetic construct
  source 1..13: mol_type = other DNA
aaattagcatatt

SEQ ID NO: 1534 - DNA, 13 bp, synthetic construct
  source 1..13: mol_type = other DNA
attatgcaaatta

SEQ ID NO: 1535 - DNA, 13 bp, synthetic construct
  source 1..13: mol_type = other DNA
taatttgcataat

SEQ ID NO: 1536 - DNA, 13 bp, synthetic construct
  source 1..13: mol_type = other DNA
attatgcaaattt

SEQ ID NO: 1537 - DNA, 13 bp, synthetic construct
  source 1..13: mol_type = other DNA
aaatttgcataat

SEQ ID NO: 1538 - DNA, 13 bp, synthetic construct
  source 1..13: mol_type = other DNA
attatgctaatta

SEQ ID NO: 1539 - DNA, 13 bp, synthetic construct
  source 1..13: mol_type = other DNA
taattagcataat

SEQ ID NO: 1540 - DNA, 13 bp, synthetic construct
  source 1..13: mol_type = other DNA
attatgctaattt

SEQ ID NO: 1541 - DNA, 13 bp, synthetic construct
  source 1..13: mol_type = other DNA
aaattagcataat

SEQ ID NO: 1542 - DNA, 13 bp, synthetic construct
  source 1..13: mol_type = other DNA
tatatgcaaatta

SEQ ID NO: 1543 - DNA, 13 bp, synthetic construct
  source 1..13: mol_type = other DNA
taatttgcatata

SEQ ID NO: 1544 - DNA, 13 bp, synthetic construct
  source 1..13: mol_type = other DNA
tatatgcaaattt

SEQ ID NO: 1545 - DNA, 13 bp, synthetic construct
  source 1..13: mol_type = other DNA
aaatttgcatata

SEQ ID NO: 1546 - DNA, 13 bp, synthetic construct
  source 1..13: mol_type = other DNA
tatatgctaatta

SEQ ID NO: 1547 - DNA, 13 bp, synthetic construct
  source 1..13: mol_type = other DNA
taattagcatata

SEQ ID NO: 1548 - DNA, 13 bp, synthetic construct
  source 1..13: mol_type = other DNA
tatatgctaattt

SEQ ID NO: 1549 - DNA, 13 bp, synthetic construct
  source 1..13: mol_type = other DNA
aaattagcatata

SEQ ID NO: 1550 - DNA, 13 bp, synthetic construct
  source 1..13: mol_type = other DNA
tttatgcaaatta

SEQ ID NO: 1551 - DNA, 13 bp, synthetic construct
  source 1..13: mol_type = other DNA
taatttgcataaa

SEQ ID NO: 1552 - DNA, 13 bp, synthetic construct
  source 1..13: mol_type = other DNA
tttatgcaaattt

SEQ ID NO: 1553 - DNA, 13 bp, synthetic construct
  source 1..13: mol_type = other DNA
aaatttgcataaa

SEQ ID NO: 1554 - DNA, 13 bp, synthetic construct
  source 1..13: mol_type = other DNA
tttatgctaatta

SEQ ID NO: 1555 - DNA, 13 bp, synthetic construct
  source 1..13: mol_type = other DNA
taattagcataaa

SEQ ID NO: 1556 - DNA, 13 bp, synthetic construct
  source 1..13: mol_type = other DNA
tttatgctaattt

SEQ ID NO: 1557 - DNA, 13 bp, synthetic construct
  source 1..13: mol_type = other DNA
aaattagcataaa

SEQ ID NO: 1558 - DNA, 13 bp, synthetic construct
  source 1..13: mol_type = other DNA
agataagcatcag

SEQ ID NO: 1559 - DNA, 13 bp, synthetic construct
  source 1..13: mol_type = other DNA
ctgatgcttatct

SEQ ID NO: 1560 - DNA, 13 bp, synthetic construct
  source 1..13: mol_type = other DNA
agataagcatcac

SEQ ID NO: 1561 - DNA, 13 bp, synthetic construct
  source 1..13: mol_type = other DNA
gtgatgcttatct

SEQ ID NO: 1562 - DNA, 13 bp, synthetic construct
  source 1..13: mol_type = other DNA
agataagcatctg

SEQ ID NO: 1563 - DNA, 13 bp, synthetic construct
  source 1..13: mol_type = other DNA
cagatgcttatct

SEQ ID NO: 1564 - DNA, 13 bp, synthetic construct
  source 1..13: mol_type = other DNA
agataagcatctc

SEQ ID NO: 1565 - DNA, 13 bp, synthetic construct
  source 1..13: mol_type = other DNA
gagatgcttatct

SEQ ID NO: 1566 - DNA, 13 bp, synthetic construct
  source 1..13: mol_type = other DNA
agataggcatcag

SEQ ID NO: 1567 - DNA, 13 bp, synthetic construct
  source 1..13: mol_type = other DNA
ctgatgcctatct

SEQ ID NO: 1568 - DNA, 13 bp, synthetic construct
  source 1..13: mol_type = other DNA
agataggcatcac

SEQ ID NO: 1569 - DNA, 13 bp, synthetic construct
  source 1..13: mol_type = other DNA
gtgatgcctatct

SEQ ID NO: 1570 - DNA, 13 bp, synthetic construct
  source 1..13: mol_type = other DNA
agataggcatctg

SEQ ID NO: 1571 - DNA, 13 bp, synthetic construct
  source 1..13: mol_type = other DNA
cagatgcctatct

SEQ ID NO: 1572 - DNA, 13 bp, synthetic construct
  source 1..13: mol_type = other DNA
agataggcatctc

SEQ ID NO: 1573 - DNA, 13 bp, synthetic construct
  source 1..13: mol_type = other DNA
gagatgcctatct

SEQ ID NO: 1574 - DNA, 13 bp, synthetic construct
  source 1..13: mol_type = other DNA
tgataagcatcag

SEQ ID NO: 1575 - DNA, 13 bp, synthetic construct
  source 1..13: mol_type = other DNA
ctgatgcttatca

SEQ ID NO: 1576 - DNA, 13 bp, synthetic construct
  source 1..13: mol_type = other DNA
tgataagcatcac

SEQ ID NO: 1577 - DNA, 13 bp, synthetic construct
  source 1..13: mol_type = other DNA
gtgatgcttatca

SEQ ID NO: 1578 - DNA, 13 bp, synthetic construct
  source 1..13: mol_type = other DNA
tgataagcatctg

SEQ ID NO: 1579 - DNA, 13 bp, synthetic construct
  source 1..13: mol_type = other DNA
cagatgcttatca

SEQ ID NO: 1580 - DNA, 13 bp, synthetic construct
  source 1..13: mol_type = other DNA
tgataagcatctc

SEQ ID NO: 1581 - DNA, 13 bp, synthetic construct
  source 1..13: mol_type = other DNA
gagatgcttatca

SEQ ID NO: 1582 - DNA, 13 bp, synthetic construct
  source 1..13: mol_type = other DNA
tgataggcatcag

SEQ ID NO: 1583 - DNA, 13 bp, synthetic construct
  source 1..13: mol_type = other DNA
ctgatgcctatca

SEQ ID NO: 1584 - DNA, 13 bp, synthetic construct
  source 1..13: mol_type = other DNA
tgataggcatcac

SEQ ID NO: 1585 - DNA, 13 bp, synthetic construct
  source 1..13: mol_type = other DNA
gtgatgcctatca

SEQ ID NO: 1586 - DNA, 13 bp, synthetic construct
  source 1..13: mol_type = other DNA
tgataggcatctg

SEQ ID NO: 1587 - DNA, 13 bp, synthetic construct
  source 1..13: mol_type = other DNA
cagatgcctatca

SEQ ID NO: 1588 - DNA, 13 bp, synthetic construct
  source 1..13: mol_type = other DNA
tgataggcatctc

SEQ ID NO: 1589 - DNA, 13 bp, synthetic construct
  source 1..13: mol_type = other DNA
gagatgcctatca

SEQ ID NO: 1590 - DNA, 10 bp, synthetic construct
  source 1..10: mol_type = other DNA
aacagctgat

SEQ ID NO: 1591 - DNA, 10 bp, synthetic construct
  source 1..10: mol_type = other DNA
atcagctgtt

SEQ ID NO: 1592 - DNA, 10 bp, synthetic construct
  source 1..10: mol_type = other DNA
atcagctgat

SEQ ID NO: 1593 - DNA, 10 bp, synthetic construct
  source 1..10: mol_type = other DNA
atcagctgat

SEQ ID NO: 1594 - DNA, 15 bp, synthetic construct
  source 1..15: mol_type = other DNA
aaaatgctgagtcat

SEQ ID NO: 1595 - DNA, 15 bp, synthetic construct
  source 1..15: mol_type = other DNA
atgactcagcatttt

SEQ ID NO: 1596 - DNA, 15 bp, synthetic construct
  source 1..15: mol_type = other DNA
aaattgctgagtcat

SEQ ID NO: 1597 - DNA, 15 bp, synthetic construct
  source 1..15: mol_type = other DNA
atgactcagcaattt

SEQ ID NO: 1598 - DNA, 15 bp, synthetic construct
  source 1..15: mol_type = other DNA
aatatgctgagtcat

SEQ ID NO: 1599 - DNA, 15 bp, synthetic construct
  source 1..15: mol_type = other DNA
atgactcagcatatt

SEQ ID NO: 1600 - DNA, 15 bp, synthetic construct
  source 1..15: mol_type = other DNA
aatttgctgagtcat

SEQ ID NO: 1601 - DNA, 15 bp, synthetic construct
  source 1..15: mol_type = other DNA
atgactcagcaaatt

SEQ ID NO: 1602 - DNA, 15 bp, synthetic construct
  source 1..15: mol_type = other DNA
ataatgctgagtcat

SEQ ID NO: 1603 - DNA, 15 bp, synthetic construct
  source 1..15: mol_type = other DNA
atgactcagcattat

SEQ ID NO: 1604 - DNA, 15 bp, synthetic construct
  source 1..15: mol_type = other DNA
atattgctgagtcat

SEQ ID NO: 1605 - DNA, 15 bp, synthetic construct
  source 1..15: mol_type = other DNA
atgactcagcaatat

SEQ ID NO: 1606 - DNA, 15 bp, synthetic construct
  source 1..15: mol_type = other DNA
attatgctgagtcat

SEQ ID NO: 1607 - DNA, 15 bp, synthetic construct
  source 1..15: mol_type = other DNA
atgactcagcataat

SEQ ID NO: 1608 - DNA, 15 bp, synthetic construct
  source 1..15: mol_type = other DNA
attttgctgagtcat

SEQ ID NO: 1609 - DNA, 15 bp, synthetic construct
  source 1..15: mol_type = other DNA
atgactcagcaaaat

SEQ ID NO: 1610 - DNA, 14 bp, synthetic construct
  source 1..14: mol_type = other DNA
tttcagttccccat

SEQ ID NO: 1611 - DNA, 14 bp, synthetic construct
  source 1..14: mol_type = other DNA
atggggaactgaaa

SEQ ID NO: 1612 - DNA, 14 bp, synthetic construct
  source 1..14: mol_type = other DNA
tttcagttcctcat

SEQ ID NO: 1613 - DNA, 14 bp, synthetic construct
  source 1..14: mol_type = other DNA
atgaggaactgaaa

SEQ ID NO: 1614 - DNA, 14 bp, synthetic construct
  source 1..14: mol_type = other DNA
tttcacttccccat

SEQ ID NO: 1615 - DNA, 14 bp, synthetic construct
  source 1..14: mol_type = other DNA
atggggaagtgaaa

SEQ ID NO: 1616 - DNA, 14 bp, synthetic construct
  source 1..14: mol_type = other DNA
tttcacttcctcat

SEQ ID NO: 1617 - DNA, 14 bp, synthetic construct
  source 1..14: mol_type = other DNA
atgaggaagtgaaa

SEQ ID NO: 1618-1621 - skipped (4 entries)

SEQ ID NO: 1622 - DNA, 12 bp, synthetic construct
  source 1..12: mol_type = other DNA
tggggaagggca

SEQ ID NO: 1623 - DNA, 12 bp, synthetic construct
  source 1..12: mol_type = other DNA
tgcccttcccca

SEQ ID NO: 1624 - DNA, 12 bp, synthetic construct
  source 1..12: mol_type = other DNA
tggggaagggcc

SEQ ID NO: 1625 - DNA, 12 bp, synthetic construct
  source 1..12: mol_type = other DNA
ggcccttcccca

SEQ ID NO: 1626-1629 - skipped (4 entries)

SEQ ID NO: 1630 - DNA, 12 bp, synthetic construct
  source 1..12: mol_type = other DNA
agataaccatct

SEQ ID NO: 1631 - DNA, 12 bp, synthetic construct
  source 1..12: mol_type = other DNA
agatggttatct

SEQ ID NO: 1632 - DNA, 12 bp, synthetic construct
  source 1..12: mol_type = other DNA
agataagcatct

SEQ ID NO: 1633 - DNA, 12 bp, synthetic construct
  source 1..12: mol_type = other DNA
agatgcttatct

SEQ ID NO: 1634 - DNA, 12 bp, synthetic construct
  source 1..12: mol_type = other DNA
agataatcatct

SEQ ID NO: 1635 - DNA, 12 bp, synthetic construct
  source 1..12: mol_type = other DNA
agatgattatct

SEQ ID NO: 1636 - DNA, 12 bp, synthetic construct
  source 1..12: mol_type = other DNA
agattaccatct

SEQ ID NO: 1637 - DNA, 12 bp, synthetic construct
  source 1..12: mol_type = other DNA
agatggtaatct

SEQ ID NO: 1638 - DNA, 12 bp, synthetic construct
  source 1..12: mol_type = other DNA
agattagcatct

SEQ ID NO: 1639 - DNA, 12 bp, synthetic construct
  source 1..12: mol_type = other DNA
agatgctaatct

SEQ ID NO: 1640 - DNA, 12 bp, synthetic construct
  source 1..12: mol_type = other DNA
agattatcatct

SEQ ID NO: 1641 - DNA, 12 bp, synthetic construct
  source 1..12: mol_type = other DNA
agatgataatct

SEQ ID NO: 1642-1647 - skipped (6 entries)

SEQ ID NO: 1648 - DNA, 20 bp, synthetic construct
  source 1..20: mol_type = other DNA
actgctgagtcagcagattc

SEQ ID NO: 1649 - DNA, 20 bp, synthetic construct
  source 1..20: mol_type = other DNA
gaatctgctgactcagcagt

SEQ ID NO: 1650 - DNA, 20 bp, synthetic construct
  source 1..20: mol_type = other DNA
actgctgagtcagcagattt

SEQ ID NO: 1651 - DNA, 20 bp, synthetic construct
  source 1..20: mol_type = other DNA
aaatctgctgactcagcagt

SEQ ID NO: 1652 - DNA, 20 bp, synthetic construct
  source 1..20: mol_type = other DNA
actgctgagtcagcagtttc

SEQ ID NO: 1653 - DNA, 20 bp, synthetic construct
  source 1..20: mol_type = other DNA
gaaactgctgactcagcagt

SEQ ID NO: 1654 - DNA, 20 bp, synthetic construct
  source 1..20: mol_type = other DNA
actgctgagtcagcagtttt

SEQ ID NO: 1655 - DNA, 20 bp, synthetic construct
  source 1..20: mol_type = other DNA
aaaactgctgactcagcagt

SEQ ID NO: 1656 - DNA, 20 bp, synthetic construct
  source 1..20: mol_type = other DNA
actgctgactcagcagattc

SEQ ID NO: 1657 - DNA, 20 bp, synthetic construct
  source 1..20: mol_type = other DNA
gaatctgctgagtcagcagt

SEQ ID NO: 1658 - DNA, 20 bp, synthetic construct
  source 1..20: mol_type = other DNA
actgctgactcagcagattt

SEQ ID NO: 1659 - DNA, 20 bp, synthetic construct
  source 1..20: mol_type = other DNA
aaatctgctgagtcagcagt

SEQ ID NO: 1660 - DNA, 20 bp, synthetic construct
  source 1..20: mol_type = other DNA
actgctgactcagcagtttc

SEQ ID NO: 1661 - DNA, 20 bp, synthetic construct
  source 1..20: mol_type = other DNA
gaaactgctgagtcagcagt

SEQ ID NO: 1662 - DNA, 20 bp, synthetic construct
  source 1..20: mol_type = other DNA
actgctgactcagcagtttt

SEQ ID NO: 1663 - DNA, 20 bp, synthetic construct
  source 1..20: mol_type = other DNA
aaaactgctgagtcagcagt

SEQ ID NO: 1664 - DNA, 20 bp, synthetic construct
  source 1..20: mol_type = other DNA
tctgctgagtcagcagattc

SEQ ID NO: 1665 - DNA, 20 bp, synthetic construct
  source 1..20: mol_type = other DNA
gaatctgctgactcagcaga

SEQ ID NO: 1666 - DNA, 20 bp, synthetic construct
  source 1..20: mol_type = other DNA
tctgctgagtcagcagattt

SEQ ID NO: 1667 - DNA, 20 bp, synthetic construct
  source 1..20: mol_type = other DNA
aaatctgctgactcagcaga

SEQ ID NO: 1668 - DNA, 20 bp, synthetic construct
  source 1..20: mol_type = other DNA
tctgctgagtcagcagtttc

SEQ ID NO: 1669 - DNA, 20 bp, synthetic construct
  source 1..20: mol_type = other DNA
gaaactgctgactcagcaga

SEQ ID NO: 1670 - DNA, 20 bp, synthetic construct
  source 1..20: mol_type = other DNA
tctgctgagtcagcagtttt

SEQ ID NO: 1671 - DNA, 20 bp, synthetic construct
  source 1..20: mol_type = other DNA
aaaactgctgactcagcaga

SEQ ID NO: 1672 - DNA, 20 bp, synthetic construct
  source 1..20: mol_type = other DNA
tctgctgactcagcagattc

SEQ ID NO: 1673 - DNA, 20 bp, synthetic construct
  source 1..20: mol_type = other DNA
gaatctgctgagtcagcaga

SEQ ID NO: 1674 - DNA, 20 bp, synthetic construct
  source 1..20: mol_type = other DNA
tctgctgactcagcagattt

SEQ ID NO: 1675 - DNA, 20 bp, synthetic construct
  source 1..20: mol_type = other DNA
aaatctgctgagtcagcaga

SEQ ID NO: 1676 - DNA, 20 bp, synthetic construct
  source 1..20: mol_type = other DNA
tctgctgactcagcagtttc

SEQ ID NO: 1677 - DNA, 20 bp, synthetic construct
  source 1..20: mol_type = other DNA
gaaactgctgagtcagcaga

SEQ ID NO: 1678 - DNA, 20 bp, synthetic construct
  source 1..20: mol_type = other DNA
tctgctgactcagcagtttt

SEQ ID NO: 1679 - DNA, 20 bp, synthetic construct
  source 1..20: mol_type = other DNA
aaaactgctgagtcagcaga

SEQ ID NO: 1680 - DNA, 11 bp, synthetic construct
  source 1..11: mol_type = other DNA
gaccacccatg

SEQ ID NO: 1681 - DNA, 11 bp, synthetic construct
  source 1..11: mol_type = other DNA
catgggtggtc

SEQ ID NO: 1682 - DNA, 20 bp, synthetic construct
  source 1..20: mol_type = other DNA
agtatcgctgcaacgaaact

SEQ ID NO: 1683 - DNA, 20 bp, synthetic construct
  source 1..20: mol_type = other DNA
agtttcgttgcagcgatact

SEQ ID NO: 1684 - DNA, 20 bp, synthetic construct
  source 1..20: mol_type = other DNA
agtatcgctgcaacgatact

SEQ ID NO: 1685 - DNA, 20 bp, synthetic construct
  source 1..20: mol_type = other DNA
agtatcgttgcagcgatact

SEQ ID NO: 1686 - DNA, 20 bp, synthetic construct
  source 1..20: mol_type = other DNA
agtatcgctgcaatgaaact

SEQ ID NO: 1687 - DNA, 20 bp, synthetic construct
  source 1..20: mol_type = other DNA
agtttcattgcagcgatact

SEQ ID NO: 1688 - DNA, 20 bp, synthetic construct
  source 1..20: mol_type = other DNA
agtatcgctgcaatgatact

SEQ ID NO: 1689 - DNA, 20 bp, synthetic construct
  source 1..20: mol_type = other DNA
agtatcattgcagcgatact

SEQ ID NO: 1690 - DNA, 20 bp, synthetic construct
  source 1..20: mol_type = other DNA
agtttcgctgcaacgaaact

SEQ ID NO: 1691 - DNA, 20 bp, synthetic construct
  source 1..20: mol_type = other DNA
agtttcgttgcagcgaaact

SEQ ID NO: 1692 - DNA, 20 bp, synthetic construct
  source 1..20: mol_type = other DNA
agtttcgctgcaacgatact

SEQ ID NO: 1693 - DNA, 20 bp, synthetic construct
  source 1..20: mol_type = other DNA
agtatcgttgcagcgaaact

SEQ ID NO: 1694 - DNA, 20 bp, synthetic construct
  source 1..20: mol_type = other DNA
agtttcgctgcaatgaaact

SEQ ID NO: 1695 - DNA, 20 bp, synthetic construct
  source 1..20: mol_type = other DNA
agtttcattgcagcgaaact

SEQ ID NO: 1696 - DNA, 20 bp, synthetic construct
  source 1..20: mol_type = other DNA
agtttcgctgcaatgatact

SEQ ID NO: 1697 - DNA, 20 bp, synthetic construct
  source 1..20: mol_type = other DNA
agtatcattgcagcgaaact

SEQ ID NO: 1698 - DNA, 20 bp, synthetic construct
  source 1..20: mol_type = other DNA
ggtatcgctgcaacgaaact

SEQ ID NO: 1699 - DNA, 20 bp, synthetic construct
  source 1..20: mol_type = other DNA
agtttcgttgcagcgatacc

SEQ ID NO: 1700 - DNA, 20 bp, synthetic construct
  source 1..20: mol_type = other DNA
ggtatcgctgcaacgatact

SEQ ID NO: 1701 - DNA, 20 bp, synthetic construct
  source 1..20: mol_type = other DNA
agtatcgttgcagcgatacc

SEQ ID NO: 1702 - DNA, 20 bp, synthetic construct
  source 1..20: mol_type = other DNA
ggtatcgctgcaatgaaact

SEQ ID NO: 1703 - DNA, 20 bp, synthetic construct
  source 1..20: mol_type = other DNA
agtttcattgcagcgatacc

SEQ ID NO: 1704 - DNA, 20 bp, synthetic construct
  source 1..20: mol_type = other DNA
ggtatcgctgcaatgatact

SEQ ID NO: 1705 - DNA, 20 bp, synthetic construct
  source 1..20: mol_type = other DNA
agtatcattgcagcgatacc

SEQ ID NO: 1706 - DNA, 20 bp, synthetic construct
  source 1..20: mol_type = other DNA
ggtttcgctgcaacgaaact

SEQ ID NO: 1707 - DNA, 20 bp, synthetic construct
  source 1..20: mol_type = other DNA
agtttcgttgcagcgaaacc

SEQ ID NO: 1708 - DNA, 20 bp, synthetic construct
  source 1..20: mol_type = other DNA
ggtttcgctgcaacgatact

SEQ ID NO: 1709 - DNA, 20 bp, synthetic construct
  source 1..20: mol_type = other DNA
agtatcgttgcagcgaaacc

SEQ ID NO: 1710 - DNA, 20 bp, synthetic construct
  source 1..20: mol_type = other DNA
ggtttcgctgcaatgaaact

SEQ ID NO: 1711 - DNA, 20 bp, synthetic construct
  source 1..20: mol_type = other DNA
agtttcattgcagcgaaacc

SEQ ID NO: 1712 - DNA, 20 bp, synthetic construct
  source 1..20: mol_type = other DNA
ggtttcgctgcaatgatact

SEQ ID NO: 1713 - DNA, 20 bp, synthetic construct
  source 1..20: mol_type = other DNA
agtatcattgcagcgaaacc

SEQ ID NO: 1714 - DNA, 16 bp, synthetic construct
  source 1..16: mol_type = other DNA
tgctgagtcagcagaa

SEQ ID NO: 1715 - DNA, 16 bp, synthetic construct
  source 1..16: mol_type = other DNA
ttctgctgactcagca

SEQ ID NO: 1716 - DNA, 16 bp, synthetic construct
  source 1..16: mol_type = other DNA
tgctgagtcagcagat

SEQ ID NO: 1717 - DNA, 16 bp, synthetic construct
  source 1..16: mol_type = other DNA
atctgctgactcagca

SEQ ID NO: 1718 - DNA, 16 bp, synthetic construct
  source 1..16: mol_type = other DNA
tgctgagtcagcagta

SEQ ID NO: 1719 - DNA, 16 bp, synthetic construct
  source 1..16: mol_type = other DNA
tactgctgactcagca

SEQ ID NO: 1720 - DNA, 16 bp, synthetic construct
  source 1..16: mol_type = other DNA
tgctgagtcagcagtt

SEQ ID NO: 1721 - DNA, 16 bp, synthetic construct
  source 1..16: mol_type = other DNA
aactgctgactcagca

SEQ ID NO: 1722 - DNA, 16 bp, synthetic construct
  source 1..16: mol_type = other DNA
tgctgactcagcagaa

SEQ ID NO: 1723 - DNA, 16 bp, synthetic construct
  source 1..16: mol_type = other DNA
ttctgctgagtcagca

SEQ ID NO: 1724 - DNA, 16 bp, synthetic construct
  source 1..16: mol_type = other DNA
tgctgactcagcagat

SEQ ID NO: 1725 - DNA, 16 bp, synthetic construct
  source 1..16: mol_type = other DNA
atctgctgagtcagca

SEQ ID NO: 1726 - DNA, 16 bp, synthetic construct
  source 1..16: mol_type = other DNA
tgctgactcagcagta

SEQ ID NO: 1727 - DNA, 16 bp, synthetic construct
  source 1..16: mol_type = other DNA
tactgctgagtcagca

SEQ ID NO: 1728 - DNA, 16 bp, synthetic construct
  source 1..16: mol_type = other DNA
tgctgactcagcagtt

SEQ ID NO: 1729 - DNA, 16 bp, synthetic construct
  source 1..16: mol_type = other DNA
aactgctgagtcagca

SEQ ID NO: 1730 - DNA, 10 bp, synthetic construct
  source 1..10: mol_type = other DNA
aacagctgtc

SEQ ID NO: 1731 - DNA, 10 bp, synthetic construct
  source 1..10: mol_type = other DNA
gacagctgtt

SEQ ID NO: 1732 - DNA, 12 bp, synthetic construct
  source 1..12: mol_type = other DNA
atgctgagtcat

SEQ ID NO: 1733 - DNA, 12 bp, synthetic construct
  source 1..12: mol_type = other DNA
atgactcagcat

SEQ ID NO: 1734 - DNA, 12 bp, synthetic construct
  source 1..12: mol_type = other DNA
ctgctgagtcat

SEQ ID NO: 1735 - DNA, 12 bp, synthetic construct
  source 1..12: mol_type = other DNA
atgactcagcag

SEQ ID NO: 1736 - DNA, 12 bp, synthetic construct
  source 1..12: mol_type = other DNA
ttgctgagtcat

SEQ ID NO: 1737 - DNA, 12 bp, synthetic construct
  source 1..12: mol_type = other DNA
atgactcagcaa

SEQ ID NO: 1738-1741 - skipped (4 entries)

SEQ ID NO: 1742 - DNA, 15 bp, synthetic construct
  source 1..15: mol_type = other DNA
taggtttctgttatc

SEQ ID NO: 1743 - DNA, 15 bp, synthetic construct
  source 1..15: mol_type = other DNA
gataacagaaaccta

SEQ ID NO: 1744 - DNA, 15 bp, synthetic construct
  source 1..15: mol_type = other DNA
taggtttctgttatt

SEQ ID NO: 1745 - DNA, 15 bp, synthetic construct
  source 1..15: mol_type = other DNA
aataacagaaaccta

SEQ ID NO: 1746 - DNA, 15 bp, synthetic construct
  source 1..15: mol_type = other DNA
tgggtttctgttatc

SEQ ID NO: 1747 - DNA, 15 bp, synthetic construct
  source 1..15: mol_type = other DNA
gataacagaaaccca

SEQ ID NO: 1748 - DNA, 15 bp, synthetic construct
  source 1..15: mol_type = other DNA
tgggtttctgttatt

SEQ ID NO: 1749 - DNA, 15 bp, synthetic construct
  source 1..15: mol_type = other DNA
aataacagaaaccca

SEQ ID NO: 1750 - DNA, 10 bp, synthetic construct
  source 1..10: mol_type = other DNA
cccacccaac

SEQ ID NO: 1751 - DNA, 10 bp, synthetic construct
  source 1..10: mol_type = other DNA
gttgggtggg

SEQ ID NO: 1752 - DNA, 10 bp, synthetic construct
  source 1..10: mol_type = other DNA
ccctcccaac

SEQ ID NO: 1753 - DNA, 10 bp, synthetic construct
  source 1..10: mol_type = other DNA
gttgggaggg

SEQ ID NO: 1754 - DNA, 14 bp, synthetic construct
  source 1..14: mol_type = other DNA
atgactcagcacat

SEQ ID NO: 1755 - DNA, 14 bp, synthetic construct
  source 1..14: mol_type = other DNA
atgtgctgagtcat

SEQ ID NO: 1756 - DNA, 14 bp, synthetic construct
  source 1..14: mol_type = other DNA
atgactcagcactt

SEQ ID NO: 1757 - DNA, 14 bp, synthetic construct
  source 1..14: mol_type = other DNA
aagtgctgagtcat

SEQ ID NO: 1758 - DNA, 16 bp, synthetic construct
  source 1..16: mol_type = other DNA
ccatttcccggaactc

SEQ ID NO: 1759 - DNA, 16 bp, synthetic construct
  source 1..16: mol_type = other DNA
gagttccgggaaatgg

SEQ ID NO: 1760 - DNA, 16 bp, synthetic construct
  source 1..16: mol_type = other DNA
tcatttcccggaactc

SEQ ID NO: 1761 - DNA, 16 bp, synthetic construct
  source 1..16: mol_type = other DNA
gagttccgggaaatga

SEQ ID NO: 1762-1763 - skipped (2 entries)

SEQ ID NO: 1764 - DNA, 11 bp, synthetic construct
  source 1..11: mol_type = other DNA
gataacagatg

SEQ ID NO: 1765 - DNA, 11 bp, synthetic construct
  source 1..11: mol_type = other DNA
catctgttatc

SEQ ID NO: 1766 - DNA, 11 bp, synthetic construct
  source 1..11: mol_type = other DNA
gataacagctg

SEQ ID NO: 1767 - DNA, 11 bp, synthetic construct
  source 1..11: mol_type = other DNA
cagctgttatc

SEQ ID NO: 1768 - DNA, 11 bp, synthetic construct
  source 1..11: mol_type = other DNA
gatagcagatg

SEQ ID NO: 1769 - DNA, 11 bp, synthetic construct
  source 1..11: mol_type = other DNA
catctgctatc

SEQ ID NO: 1770 - DNA, 11 bp, synthetic construct
  source 1..11: mol_type = other DNA
gatagcagctg

SEQ ID NO: 1771 - DNA, 11 bp, synthetic construct
  source 1..11: mol_type = other DNA
cagctgctatc

SEQ ID NO: 1772 - DNA, 11 bp, synthetic construct
  source 1..11: mol_type = other DNA
ggtaacagatg

SEQ ID NO: 1773 - DNA, 11 bp, synthetic construct
  source 1..11: mol_type = other DNA
catctgttacc

SEQ ID NO: 1774 - DNA, 11 bp, synthetic construct
  source 1..11: mol_type = other DNA
ggtaacagctg

SEQ ID NO: 1775 - DNA, 11 bp, synthetic construct
  source 1..11: mol_type = other DNA
cagctgttacc

SEQ ID NO: 1776 - DNA, 11 bp, synthetic construct
  source 1..11: mol_type = other DNA
ggtagcagatg

SEQ ID NO: 1777 - DNA, 11 bp, synthetic construct
  source 1..11: mol_type = other DNA
catctgctacc

SEQ ID NO: 1778 - DNA, 11 bp, synthetic construct
  source 1..11: mol_type = other DNA
ggtagcagctg

SEQ ID NO: 1779 - DNA, 11 bp, synthetic construct
  source 1..11: mol_type = other DNA
cagctgctacc

SEQ ID NO: 1780 - DNA, 12 bp, synthetic construct
  source 1..12: mol_type = other DNA
actttcgtttct

SEQ ID NO: 1781 - DNA, 12 bp, synthetic construct
  source 1..12: mol_type = other DNA
agaaacgaaagt

SEQ ID NO: 1782 - DNA, 15 bp, synthetic construct
  source 1..15: mol_type = other DNA
caaactgtcaagcgc

SEQ ID NO: 1783 - DNA, 15 bp, synthetic construct
  source 1..15: mol_type = other DNA
gcgcttgacagtttg

SEQ ID NO: 1784 - DNA, 15 bp, synthetic construct
  source 1..15: mol_type = other DNA
caaactgtcaagtgc

SEQ ID NO: 1785 - DNA, 15 bp, synthetic construct
  source 1..15: mol_type = other DNA
gcacttgacagtttg

SEQ ID NO: 1786 - DNA, 15 bp, synthetic construct
  source 1..15: mol_type = other DNA
caaactgtcgagcgc

SEQ ID NO: 1787 - DNA, 15 bp, synthetic construct
  source 1..15: mol_type = other DNA
gcgctcgacagtttg

SEQ ID NO: 1788 - DNA, 15 bp, synthetic construct
  source 1..15: mol_type = other DNA
caaactgtcgagtgc

SEQ ID NO: 1789 - DNA, 15 bp, synthetic construct
  source 1..15: mol_type = other DNA
gcactcgacagtttg

SEQ ID NO: 1790 - DNA, 15 bp, synthetic construct
  source 1..15: mol_type = other DNA
taaactgtcaagcgc

SEQ ID NO: 1791 - DNA, 15 bp, synthetic construct
  source 1..15: mol_type = other DNA
gcgcttgacagttta

SEQ ID NO: 1792 - DNA, 15 bp, synthetic construct
  source 1..15: mol_type = other DNA
taaactgtcaagtgc

SEQ ID NO: 1793 - DNA, 15 bp, synthetic construct
  source 1..15: mol_type = other DNA
gcacttgacagttta

SEQ ID NO: 1794 - DNA, 15 bp, synthetic construct
  source 1..15: mol_type = other DNA
taaactgtcgagcgc

SEQ ID NO: 1795 - DNA, 15 bp, synthetic construct
  source 1..15: mol_type = other DNA
gcgctcgacagttta

SEQ ID NO: 1796 - DNA, 15 bp, synthetic construct
  source 1..15: mol_type = other DNA
taaactgtcgagtgc

SEQ ID NO: 1797 - DNA, 15 bp, synthetic construct
  source 1..15: mol_type = other DNA
gcactcgacagttta

SEQ ID NO: 1798 - DNA, 13 bp, synthetic construct
  source 1..13: mol_type = other DNA
ggccacgcccacc

SEQ ID NO: 1799 - DNA, 13 bp, synthetic construct
  source 1..13: mol_type = other DNA
ggtgggcgtggcc

SEQ ID NO: 1800 - DNA, 13 bp, synthetic construct
  source 1..13: mol_type = other DNA
ggccacgcccact

SEQ ID NO: 1801 - DNA, 13 bp, synthetic construct
  source 1..13: mol_type = other DNA
agtgggcgtggcc

SEQ ID NO: 1802 - DNA, 13 bp, synthetic construct
  source 1..13: mol_type = other DNA
ggccacgcccccc

SEQ ID NO: 1803 - DNA, 13 bp, synthetic construct
  source 1..13: mol_type = other DNA
ggggggcgtggcc

SEQ ID NO: 1804 - DNA, 13 bp, synthetic construct
  source 1..13: mol_type = other DNA
ggccacgccccct

SEQ ID NO: 1805 - DNA, 13 bp, synthetic construct
  source 1..13: mol_type = other DNA
agggggcgtggcc

SEQ ID NO: 1806 - DNA, 13 bp, synthetic construct
  source 1..13: mol_type = other DNA
ggccccgcccacc

SEQ ID NO: 1807 - DNA, 13 bp, synthetic construct
  source 1..13: mol_type = other DNA
ggtgggcggggcc

SEQ ID NO: 1808 - DNA, 13 bp, synthetic construct
  source 1..13: mol_type = other DNA
ggccccgcccact

SEQ ID NO: 1809 - DNA, 13 bp, synthetic construct
  source 1..13: mol_type = other DNA
agtgggcggggcc

SEQ ID NO: 1810 - DNA, 13 bp, synthetic construct
  source 1..13: mol_type = other DNA
ggccccgcccccc

SEQ ID NO: 1811 - DNA, 13 bp, synthetic construct
  source 1..13: mol_type = other DNA
ggggggcggggcc

SEQ ID NO: 1812 - DNA, 13 bp, synthetic construct
  source 1..13: mol_type = other DNA
ggccccgccccct

SEQ ID NO: 1813 - DNA, 13 bp, synthetic construct
  source 1..13: mol_type = other DNA
agggggcggggcc

SEQ ID NO: 1814-1817 - skipped (4 entries)

SEQ ID NO: 1818 - DNA, 14 bp, synthetic construct
  source 1..14: mol_type = other DNA
cagtcaccctcagg

SEQ ID NO: 1819 - DNA, 14 bp, synthetic construct
  source 1..14: mol_type = other DNA
cctgagggtgactg

SEQ ID NO: 1820 - DNA, 14 bp, synthetic construct
  source 1..14: mol_type = other DNA
cagtcaccctctgg

SEQ ID NO: 1821 - DNA, 14 bp, synthetic construct
  source 1..14: mol_type = other DNA
ccagagggtgactg

SEQ ID NO: 1822 - DNA, 14 bp, synthetic construct
  source 1..14: mol_type = other DNA
cagtcaccttcagg

SEQ ID NO: 1823 - DNA, 14 bp, synthetic construct
  source 1..14: mol_type = other DNA
cctgaaggtgactg

SEQ ID NO: 1824 - DNA, 14 bp, synthetic construct
  source 1..14: mol_type = other DNA
cagtcaccttctgg

SEQ ID NO: 1825 - DNA, 14 bp, synthetic construct
  source 1..14: mol_type = other DNA
ccagaaggtgactg

SEQ ID NO: 1826 - DNA, 12 bp, synthetic construct
  source 1..12: mol_type = other DNA
atgacgtcacca

SEQ ID NO: 1827 - DNA, 12 bp, synthetic construct
  source 1..12: mol_type = other DNA
tggtgacgtcat

SEQ ID NO: 1828 - DNA, 12 bp, synthetic construct
  source 1..12: mol_type = other DNA
atgacgtcaccc

SEQ ID NO: 1829 - DNA, 12 bp, synthetic construct
  source 1..12: mol_type = other DNA
gggtgacgtcat

SEQ ID NO: 1830 - DNA, 12 bp, synthetic construct
  source 1..12: mol_type = other DNA
atgacgtcatca

SEQ ID NO: 1831 - DNA, 12 bp, synthetic construct
  source 1..12: mol_type = other DNA
tgatgacgtcat

SEQ ID NO: 1832 - DNA, 12 bp, synthetic construct
  source 1..12: mol_type = other DNA
atgacgtcatcc

SEQ ID NO: 1833 - DNA, 12 bp, synthetic construct
  source 1..12: mol_type = other DNA
ggatgacgtcat

SEQ ID NO: 1834 - DNA, 12 bp, synthetic construct
  source 1..12: mol_type = other DNA
gtgacgtcacca

SEQ ID NO: 1835 - DNA, 12 bp, synthetic construct
  source 1..12: mol_type = other DNA
tggtgacgtcac

SEQ ID NO: 1836 - DNA, 12 bp, synthetic construct
  source 1..12: mol_type = other DNA
gtgacgtcaccc

SEQ ID NO: 1837 - DNA, 12 bp, synthetic construct
  source 1..12: mol_type = other DNA
gggtgacgtcac

SEQ ID NO: 1838 - DNA, 12 bp, synthetic construct
  source 1..12: mol_type = other DNA
gtgacgtcatca

SEQ ID NO: 1839 - DNA, 12 bp, synthetic construct
  source 1..12: mol_type = other DNA
tgatgacgtcac

SEQ ID NO: 1840 - DNA, 12 bp, synthetic construct
  source 1..12: mol_type = other DNA
gtgacgtcatcc

SEQ ID NO: 1841 - DNA, 12 bp, synthetic construct
  source 1..12: mol_type = other DNA
ggatgacgtcac

SEQ ID NO: 1842 - DNA, 11 bp, synthetic construct
  source 1..11: mol_type = other DNA
accaaaggtca

SEQ ID NO: 1843 - DNA, 11 bp, synthetic construct
  source 1..11: mol_type = other DNA
tgacctttggt

SEQ ID NO: 1844 - DNA, 11 bp, synthetic construct
  source 1..11: mol_type = other DNA
accaagggtca

SEQ ID NO: 1845 - DNA, 11 bp, synthetic construct
  source 1..11: mol_type = other DNA
tgacccttggt

SEQ ID NO: 1846 - DNA, 11 bp, synthetic construct
  source 1..11: mol_type = other DNA
accagaggtca

SEQ ID NO: 1847 - DNA, 11 bp, synthetic construct
  source 1..11: mol_type = other DNA
tgacctctggt

SEQ ID NO: 1848 - DNA, 11 bp, synthetic construct
  source 1..11: mol_type = other DNA
accaggggtca

SEQ ID NO: 1849 - DNA, 11 bp, synthetic construct
  source 1..11: mol_type = other DNA
tgacccctggt

SEQ ID NO: 1850 - DNA, 11 bp, synthetic construct
  source 1..11: mol_type = other DNA
agcaaaggtca

SEQ ID NO: 1851 - DNA, 11 bp, synthetic construct
  source 1..11: mol_type = other DNA
tgacctttgct

SEQ ID NO: 1852 - DNA, 11 bp, synthetic construct
  source 1..11: mol_type = other DNA
agcaagggtca

SEQ ID NO: 1853 - DNA, 11 bp, synthetic construct
  source 1..11: mol_type = other DNA
tgacccttgct

SEQ ID NO: 1854 - DNA, 11 bp, synthetic construct
  source 1..11: mol_type = other DNA
agcagaggtca

SEQ ID NO: 1855 - DNA, 11 bp, synthetic construct
  source 1..11: mol_type = other DNA
tgacctctgct

SEQ ID NO: 1856 - DNA, 11 bp, synthetic construct
  source 1..11: mol_type = other DNA
agcaggggtca

SEQ ID NO: 1857 - DNA, 11 bp, synthetic construct
  source 1..11: mol_type = other DNA
tgacccctgct

SEQ ID NO: 1858 - DNA, 11 bp, synthetic construct
  source 1..11: mol_type = other DNA
atcaaaggtca

SEQ ID NO: 1859 - DNA, 11 bp, synthetic construct
  source 1..11: mol_type = other DNA
tgacctttgat

SEQ ID NO: 1860 - DNA, 11 bp, synthetic construct
  source 1..11: mol_type = other DNA
atcaagggtca

SEQ ID NO: 1861 - DNA, 11 bp, synthetic construct
  source 1..11: mol_type = other DNA
tgacccttgat

SEQ ID NO: 1862 - DNA, 11 bp, synthetic construct
  source 1..11: mol_type = other DNA
atcagaggtca

SEQ ID NO: 1863 - DNA, 11 bp, synthetic construct
  source 1..11: mol_type = other DNA
tgacctctgat

SEQ ID NO: 1864 - DNA, 11 bp, synthetic construct
  source 1..11: mol_type = other DNA
atcaggggtca

SEQ ID NO: 1865 - DNA, 11 bp, synthetic construct
  source 1..11: mol_type = other DNA
tgacccctgat

SEQ ID NO: 1866 - DNA, 11 bp, synthetic construct
  source 1..11: mol_type = other DNA
gccaaaggtca

SEQ ID NO: 1867 - DNA, 11 bp, synthetic construct
  source 1..11: mol_type = other DNA
tgacctttggc

SEQ ID NO: 1868 - DNA, 11 bp, synthetic construct
  source 1..11: mol_type = other DNA
gccaagggtca

SEQ ID NO: 1869 - DNA, 11 bp, synthetic construct
  source 1..11: mol_type = other DNA
tgacccttggc

SEQ ID NO: 1870 - DNA, 11 bp, synthetic construct
  source 1..11: mol_type = other DNA
gccagaggtca

SEQ ID NO: 1871 - DNA, 11 bp, synthetic construct
  source 1..11: mol_type = other DNA
tgacctctggc

SEQ ID NO: 1872 - DNA, 11 bp, synthetic construct
  source 1..11: mol_type = other DNA
gccaggggtca

SEQ ID NO: 1873 - DNA, 11 bp, synthetic construct
  source 1..11: mol_type = other DNA
tgacccctggc

SEQ ID NO: 1874 - DNA, 11 bp, synthetic construct
  source 1..11: mol_type = other DNA
ggcaaaggtca

SEQ ID NO: 1875 - DNA, 11 bp, synthetic construct
  source 1..11: mol_type = other DNA
tgacctttgcc

SEQ ID NO: 1876 - DNA, 11 bp, synthetic construct
  source 1..11: mol_type = other DNA
ggcaagggtca

SEQ ID NO: 1877 - DNA, 11 bp, synthetic construct
  source 1..11: mol_type = other DNA
tgacccttgcc

SEQ ID NO: 1878 - DNA, 11 bp, synthetic construct
  source 1..11: mol_type = other DNA
ggcagaggtca

SEQ ID NO: 1879 - DNA, 11 bp, synthetic construct
  source 1..11: mol_type = other DNA
tgacctctgcc

SEQ ID NO: 1880 - DNA, 11 bp, synthetic construct
  source 1..11: mol_type = other DNA
ggcaggggtca

SEQ ID NO: 1881 - DNA, 11 bp, synthetic construct
  source 1..11: mol_type = other DNA
tgacccctgcc

SEQ ID NO: 1882 - DNA, 11 bp, synthetic construct
  source 1..11: mol_type = other DNA
gtcaaaggtca

SEQ ID NO: 1883 - DNA, 11 bp, synthetic construct
  source 1..11: mol_type = other DNA
tgacctttgac

SEQ ID NO: 1884 - DNA, 11 bp, synthetic construct
  source 1..11: mol_type = other DNA
gtcaagggtca

SEQ ID NO: 1885 - DNA, 11 bp, synthetic construct
  source 1..11: mol_type = other DNA
tgacccttgac

SEQ ID NO: 1886 - DNA, 11 bp, synthetic construct
  source 1..11: mol_type = other DNA
gtcagaggtca

SEQ ID NO: 1887 - DNA, 11 bp, synthetic construct
  source 1..11: mol_type = other DNA
tgacctctgac

SEQ ID NO: 1888 - DNA, 11 bp, synthetic construct
  source 1..11: mol_type = other DNA
gtcaggggtca

SEQ ID NO: 1889 - DNA, 11 bp, synthetic construct
  source 1..11: mol_type = other DNA
tgacccctgac

SEQ ID NO: 1890-1891 - skipped (2 entries)

SEQ ID NO: 1892 - DNA, 16 bp, synthetic construct
  source 1..16: mol_type = other DNA
cgtttaccggaaatga

SEQ ID NO: 1893 - DNA, 16 bp, synthetic construct
  source 1..16: mol_type = other DNA
tcatttccggtaaacg

SEQ ID NO: 1894 - DNA, 16 bp, synthetic construct
  source 1..16: mol_type = other DNA
cgtttaccggaaatca

SEQ ID NO: 1895 - DNA, 16 bp, synthetic construct
  source 1..16: mol_type = other DNA
tgatttccggtaaacg

SEQ ID NO: 1896 - DNA, 16 bp, synthetic construct
  source 1..16: mol_type = other DNA
cgtttaccggaagtga

SEQ ID NO: 1897 - DNA, 16 bp, synthetic construct
  source 1..16: mol_type = other DNA
tcacttccggtaaacg

SEQ ID NO: 1898 - DNA, 16 bp, synthetic construct
  source 1..16: mol_type = other DNA
cgtttaccggaagtca

SEQ ID NO: 1899 - DNA, 16 bp, synthetic construct
  source 1..16: mol_type = other DNA
tgacttccggtaaacg

SEQ ID NO: 1900 - DNA, 16 bp, synthetic construct
  source 1..16: mol_type = other DNA
cgtttactggaaatga

SEQ ID NO: 1901 - DNA, 16 bp, synthetic construct
  source 1..16: mol_type = other DNA
tcatttccagtaaacg

SEQ ID NO: 1902 - DNA, 16 bp, synthetic construct
  source 1..16: mol_type = other DNA
cgtttactggaaatca

SEQ ID NO: 1903 - DNA, 16 bp, synthetic construct
  source 1..16: mol_type = other DNA
tgatttccagtaaacg

SEQ ID NO: 1904 - DNA, 16 bp, synthetic construct
  source 1..16: mol_type = other DNA
cgtttactggaagtga

SEQ ID NO: 1905 - DNA, 16 bp, synthetic construct
  source 1..16: mol_type = other DNA
tcacttccagtaaacg

SEQ ID NO: 1906 - DNA, 16 bp, synthetic construct
  source 1..16: mol_type = other DNA
cgtttactggaagtca

SEQ ID NO: 1907 - DNA, 16 bp, synthetic construct
  source 1..16: mol_type = other DNA
tgacttccagtaaacg

SEQ ID NO: 1908 - DNA, 16 bp, synthetic construct
  source 1..16: mol_type = other DNA
cgtttcccggaaatga

SEQ ID NO: 1909 - DNA, 16 bp, synthetic construct
  source 1..16: mol_type = other DNA
tcatttccgggaaacg

SEQ ID NO: 1910 - DNA, 16 bp, synthetic construct
  source 1..16: mol_type = other DNA
cgtttcccggaaatca

SEQ ID NO: 1911 - DNA, 16 bp, synthetic construct
  source 1..16: mol_type = other DNA
tgatttccgggaaacg

SEQ ID NO: 1912 - DNA, 16 bp, synthetic construct
  source 1..16: mol_type = other DNA
cgtttcccggaagtga

SEQ ID NO: 1913 - DNA, 16 bp, synthetic construct
  source 1..16: mol_type = other DNA
tcacttccgggaaacg

SEQ ID NO: 1914 - DNA, 16 bp, synthetic construct
  source 1..16: mol_type = other DNA
cgtttcccggaagtca

SEQ ID NO: 1915 - DNA, 16 bp, synthetic construct
  source 1..16: mol_type = other DNA
tgacttccgggaaacg

SEQ ID NO: 1916 - DNA, 16 bp, synthetic construct
  source 1..16: mol_type = other DNA
cgtttcctggaaatga

SEQ ID NO: 1917 - DNA, 16 bp, synthetic construct
  source 1..16: mol_type = other DNA
tcatttccaggaaacg

SEQ ID NO: 1918 - DNA, 16 bp, synthetic construct
  source 1..16: mol_type = other DNA
cgtttcctggaaatca

SEQ ID NO: 1919 - DNA, 16 bp, synthetic construct
  source 1..16: mol_type = other DNA
tgatttccaggaaacg

SEQ ID NO: 1920 - DNA, 16 bp, synthetic construct
  source 1..16: mol_type = other DNA
cgtttcctggaagtga

SEQ ID NO: 1921 - DNA, 16 bp, synthetic construct
  source 1..16: mol_type = other DNA
tcacttccaggaaacg

SEQ ID NO: 1922 - DNA, 16 bp, synthetic construct
  source 1..16: mol_type = other DNA
cgtttcctggaagtca

SEQ ID NO: 1923 - DNA, 16 bp, synthetic construct
  source 1..16: mol_type = other DNA
tgacttccaggaaacg

SEQ ID NO: 1924-1929 - skipped (6 entries)

SEQ ID NO: 1930 - DNA, 12 bp, synthetic construct
  source 1..12: mol_type = other DNA
gcatgtttacat

SEQ ID NO: 1931 - DNA, 12 bp, synthetic construct
  source 1..12: mol_type = other DNA
atgtaaacatgc

SEQ ID NO: 1932 - DNA, 12 bp, synthetic construct
  source 1..12: mol_type = other DNA
gcctgtttacat

SEQ ID NO: 1933 - DNA, 12 bp, synthetic construct
  source 1..12: mol_type = other DNA
atgtaaacaggc

SEQ ID NO: 1934 - DNA, 12 bp, synthetic construct
  source 1..12: mol_type = other DNA
gcttgtttacat

SEQ ID NO: 1935 - DNA, 12 bp, synthetic construct
  source 1..12: mol_type = other DNA
atgtaaacaagc

SEQ ID NO: 1936 - DNA, 12 bp, synthetic construct
  source 1..12: mol_type = other DNA
ccatgtttacat

SEQ ID NO: 1937 - DNA, 12 bp, synthetic construct
  source 1..12: mol_type = other DNA
atgtaaacatgg

SEQ ID NO: 1938 - DNA, 12 bp, synthetic construct
  source 1..12: mol_type = other DNA
ccctgtttacat

SEQ ID NO: 1939 - DNA, 12 bp, synthetic construct
  source 1..12: mol_type = other DNA
atgtaaacaggg

SEQ ID NO: 1940 - DNA, 12 bp, synthetic construct
  source 1..12: mol_type = other DNA
ccttgtttacat

SEQ ID NO: 1941 - DNA, 12 bp, synthetic construct
  source 1..12: mol_type = other DNA
atgtaaacaagg

SEQ ID NO: 1942-1945 - skipped (4 entries)

SEQ ID NO: 1946 - DNA, 14 bp, synthetic construct
  source 1..14: mol_type = other DNA
tagggcaaaggtca

SEQ ID NO: 1947 - DNA, 14 bp, synthetic construct
  source 1..14: mol_type = other DNA
tgacctttgcccta

SEQ ID NO: 1948-1965 - skipped (18 entries)

SEQ ID NO: 1966 - DNA, 20 bp, synthetic construct
  source 1..20: mol_type = other DNA
actcgtattcgtgttacttc

SEQ ID NO: 1967 - DNA, 20 bp, synthetic construct
  source 1..20: mol_type = other DNA
gaagtaacacgaatacgagt

SEQ ID NO: 1968 - DNA, 20 bp, synthetic construct
  source 1..20: mol_type = other DNA
actcttattcgtgttacttc

SEQ ID NO: 1969 - DNA, 20 bp, synthetic construct
  source 1..20: mol_type = other DNA
gaagtaacacgaataagagt

SEQ ID NO: 1970 - DNA, 20 bp, synthetic construct
  source 1..20: mol_type = other DNA
acttgtattcgtgttacttc

SEQ ID NO: 1971 - DNA, 20 bp, synthetic construct
  source 1..20: mol_type = other DNA
gaagtaacacgaatacaagt

SEQ ID NO: 1972 - DNA, 20 bp, synthetic construct
  source 1..20: mol_type = other DNA
acttttattcgtgttacttc

SEQ ID NO: 1973 - DNA, 20 bp, synthetic construct
  source 1..20: mol_type = other DNA
gaagtaacacgaataaaagt

SEQ ID NO: 1974-1975 - skipped (2 entries)

SEQ ID NO: 1976 - DNA, 16 bp, synthetic construct
  source 1..16: mol_type = other DNA
ggggggagcgtccccc

SEQ ID NO: 1977 - DNA, 16 bp, synthetic construct
  source 1..16: mol_type = other DNA
gggggacgctcccccc

SEQ ID NO: 1978 - DNA, 16 bp, synthetic construct
  source 1..16: mol_type = other DNA
ggggggggcgtccccc

SEQ ID NO: 1979 - DNA, 16 bp, synthetic construct
  source 1..16: mol_type = other DNA
gggggacgcccccccc

SEQ ID NO: 1980 - DNA, 16 bp, synthetic construct
  source 1..16: mol_type = other DNA
ggtgggagcgtccccc

SEQ ID NO: 1981 - DNA, 16 bp, synthetic construct
  source 1..16: mol_type = other DNA
gggggacgctcccacc

SEQ ID NO: 1982 - DNA, 16 bp, synthetic construct
  source 1..16: mol_type = other DNA
ggtgggggcgtccccc

SEQ ID NO: 1983 - DNA, 16 bp, synthetic construct
  source 1..16: mol_type = other DNA
gggggacgcccccacc

SEQ ID NO: 1984-1989 - skipped (6 entries)

SEQ ID NO: 1990 - DNA, 13 bp, synthetic construct
  source 1..13: mol_type = other DNA
tgtccgtctgtcc

SEQ ID NO: 1991 - DNA, 13 bp, synthetic construct
  source 1..13: mol_type = other DNA
ggacagacggaca

SEQ ID NO: 1992 - DNA, 13 bp, synthetic construct
  source 1..13: mol_type = other DNA
tgtctgtctgtcc

SEQ ID NO: 1993 - DNA, 13 bp, synthetic construct
  source 1..13: mol_type = other DNA
ggacagacagaca

SEQ ID NO: 1994 - DNA, 14 bp, synthetic construct
  source 1..14: mol_type = other DNA
ggcaatcactcgcc

SEQ ID NO: 1995 - DNA, 14 bp, synthetic construct
  source 1..14: mol_type = other DNA
ggcgagtgattgcc

SEQ ID NO: 1996 - DNA, 14 bp, synthetic construct
  source 1..14: mol_type = other DNA
ggcaatcacttgcc

SEQ ID NO: 1997 - DNA, 14 bp, synthetic construct
  source 1..14: mol_type = other DNA
ggcaagtgattgcc

SEQ ID NO: 1998 - DNA, 14 bp, synthetic construct
  source 1..14: mol_type = other DNA
ggcagtcactcgcc

SEQ ID NO: 1999 - DNA, 14 bp, synthetic construct
  source 1..14: mol_type = other DNA
ggcgagtgactgcc

SEQ ID NO: 2000 - DNA, 14 bp, synthetic construct
  source 1..14: mol_type = other DNA
ggcagtcacttgcc

SEQ ID NO: 2001 - DNA, 14 bp, synthetic construct
  source 1..14: mol_type = other DNA
ggcaagtgactgcc

SEQ ID NO: 2002 - DNA, 14 bp, synthetic construct
  source 1..14: mol_type = other DNA
ggcgatcactcgcc

SEQ ID NO: 2003 - DNA, 14 bp, synthetic construct
  source 1..14: mol_type = other DNA
ggcgagtgatcgcc

SEQ ID NO: 2004 - DNA, 14 bp, synthetic construct
  source 1..14: mol_type = other DNA
ggcgatcacttgcc

SEQ ID NO: 2005 - DNA, 14 bp, synthetic construct
  source 1..14: mol_type = other DNA
ggcaagtgatcgcc

SEQ ID NO: 2006 - DNA, 14 bp, synthetic construct
  source 1..14: mol_type = other DNA
ggcggtcactcgcc

SEQ ID NO: 2007 - DNA, 14 bp, synthetic construct
  source 1..14: mol_type = other DNA
ggcgagtgaccgcc

SEQ ID NO: 2008 - DNA, 14 bp, synthetic construct
  source 1..14: mol_type = other DNA
ggcggtcacttgcc

SEQ ID NO: 2009 - DNA, 14 bp, synthetic construct
  source 1..14: mol_type = other DNA
ggcaagtgaccgcc

SEQ ID NO: 2010-2011 - skipped (2 entries)

SEQ ID NO: 2012 - DNA, 12 bp, synthetic construct
  source 1..12: mol_type = other DNA
agcagctgctgc

SEQ ID NO: 2013 - DNA, 12 bp, synthetic construct
  source 1..12: mol_type = other DNA
gcagcagctgct

SEQ ID NO: 2014 - DNA, 10 bp, synthetic construct
  source 1..10: mol_type = other DNA
cggtttcaaa

SEQ ID NO: 2015 - DNA, 10 bp, synthetic construct
  source 1..10: mol_type = other DNA
tttgaaaccg

SEQ ID NO: 2016 - DNA, 12 bp, synthetic construct
  source 1..12: mol_type = other DNA
atgacgtcatcc

SEQ ID NO: 2017 - DNA, 12 bp, synthetic construct
  source 1..12: mol_type = other DNA
ggatgacgtcat

SEQ ID NO: 2018-2021 - skipped (4 entries)

SEQ ID NO: 2022 - DNA, 10 bp, synthetic construct
  source 1..10: mol_type = other DNA
ttccagagaa

SEQ ID NO: 2023 - DNA, 10 bp, synthetic construct
  source 1..10: mol_type = other DNA
ttctctggaa

SEQ ID NO: 2024 - DNA, 10 bp, synthetic construct
  source 1..10: mol_type = other DNA
ttccacagaa

SEQ ID NO: 2025 - DNA, 10 bp, synthetic construct
  source 1..10: mol_type = other DNA
ttctgtggaa

SEQ ID NO: 2026 - DNA, 10 bp, synthetic construct
  source 1..10: mol_type = other DNA
ttcctgagaa

SEQ ID NO: 2027 - DNA, 10 bp, synthetic construct
  source 1..10: mol_type = other DNA
ttctcaggaa

SEQ ID NO: 2028 - DNA, 10 bp, synthetic construct
  source 1..10: mol_type = other DNA
ttcctcagaa

SEQ ID NO: 2029 - DNA, 10 bp, synthetic construct
  source 1..10: mol_type = other DNA
ttctgaggaa

SEQ ID NO: 2030-2031 - skipped (2 entries)

SEQ ID NO: 2032 - DNA, 17 bp, synthetic construct
  source 1..17: mol_type = other DNA
taattggcatttaattg

SEQ ID NO: 2033 - DNA, 17 bp, synthetic construct
  source 1..17: mol_type = other DNA
caattaaatgccaatta

SEQ ID NO: 2034 - DNA, 17 bp, synthetic construct
  source 1..17: mol_type = other DNA
taattgccatttaattg

SEQ ID NO: 2035 - DNA, 17 bp, synthetic construct
  source 1..17: mol_type = other DNA
caattaaatggcaatta

SEQ ID NO: 2036 - DNA, 15 bp, synthetic construct
  source 1..15: mol_type = other DNA
tgacaaaaaccagac

SEQ ID NO: 2037 - DNA, 15 bp, synthetic construct
  source 1..15: mol_type = other DNA
gtctggtttttgtca

SEQ ID NO: 2038 - DNA, 15 bp, synthetic construct
  source 1..15: mol_type = other DNA
tgacaaaaaccaggc

SEQ ID NO: 2039 - DNA, 15 bp, synthetic construct
  source 1..15: mol_type = other DNA
gcctggtttttgtca

SEQ ID NO: 2040 - DNA, 15 bp, synthetic construct
  source 1..15: mol_type = other DNA
tgacaaaagccagac

SEQ ID NO: 2041 - DNA, 15 bp, synthetic construct
  source 1..15: mol_type = other DNA
gtctggcttttgtca

SEQ ID NO: 2042 - DNA, 15 bp, synthetic construct
  source 1..15: mol_type = other DNA
tgacaaaagccaggc

SEQ ID NO: 2043 - DNA, 15 bp, synthetic construct
  source 1..15: mol_type = other DNA
gcctggcttttgtca

SEQ ID NO: 2044 - DNA, 15 bp, synthetic construct
  source 1..15: mol_type = other DNA
tgacaaagaccagac

SEQ ID NO: 2045 - DNA, 15 bp, synthetic construct
  source 1..15: mol_type = other DNA
gtctggtctttgtca

SEQ ID NO: 2046 - DNA, 15 bp, synthetic construct
  source 1..15: mol_type = other DNA
tgacaaagaccaggc

SEQ ID NO: 2047 - DNA, 15 bp, synthetic construct
  source 1..15: mol_type = other DNA
gcctggtctttgtca

SEQ ID NO: 2048 - DNA, 15 bp, synthetic construct
  source 1..15: mol_type = other DNA
tgacaaaggccagac

SEQ ID NO: 2049 - DNA, 15 bp, synthetic construct
  source 1..15: mol_type = other DNA
gtctggcctttgtca

SEQ ID NO: 2050 - DNA, 15 bp, synthetic construct
  source 1..15: mol_type = other DNA
tgacaaaggccaggc

SEQ ID NO: 2051 - DNA, 15 bp, synthetic construct
  source 1..15: mol_type = other DNA
gcctggcctttgtca

SEQ ID NO: 2052 - DNA, 18 bp, synthetic construct
  source 1..18: mol_type = other DNA
taattggaatttaattgc

SEQ ID NO: 2053 - DNA, 18 bp, synthetic construct
  source 1..18: mol_type = other DNA
gcaattaaattccaatta

SEQ ID NO: 2054 - DNA, 18 bp, synthetic construct
  source 1..18: mol_type = other DNA
taattggattttaattgc

SEQ ID NO: 2055 - DNA, 18 bp, synthetic construct
  source 1..18: mol_type = other DNA
gcaattaaaatccaatta

SEQ ID NO: 2056 - DNA, 18 bp, synthetic construct
  source 1..18: mol_type = other DNA
taattggtatttaattgc

SEQ ID NO: 2057 - DNA, 18 bp, synthetic construct
  source 1..18: mol_type = other DNA
gcaattaaataccaatta

SEQ ID NO: 2058 - DNA, 18 bp, synthetic construct
  source 1..18: mol_type = other DNA
taattggtttttaattgc

SEQ ID NO: 2059 - DNA, 18 bp, synthetic construct
  source 1..18: mol_type = other DNA
gcaattaaaaaccaatta

SEQ ID NO: 2060 - DNA, 18 bp, synthetic construct
  source 1..18: mol_type = other DNA
taattgcaatttaattgc

SEQ ID NO: 2061 - DNA, 18 bp, synthetic construct
  source 1..18: mol_type = other DNA
gcaattaaattgcaatta

SEQ ID NO: 2062 - DNA, 18 bp, synthetic construct
  source 1..18: mol_type = other DNA
taattgcattttaattgc

SEQ ID NO: 2063 - DNA, 18 bp, synthetic construct
  source 1..18: mol_type = other DNA
gcaattaaaatgcaatta

SEQ ID NO: 2064 - DNA, 18 bp, synthetic construct
  source 1..18: mol_type = other DNA
taattgctatttaattgc

SEQ ID NO: 2065 - DNA, 18 bp, synthetic construct
  source 1..18: mol_type = other DNA
gcaattaaatagcaatta

SEQ ID NO: 2066 - DNA, 18 bp, synthetic construct
  source 1..18: mol_type = other DNA
taattgctttttaattgc

SEQ ID NO: 2067 - DNA, 18 bp, synthetic construct
  source 1..18: mol_type = other DNA
gcaattaaaaagcaatta

SEQ ID NO: 2068-2075 - skipped (8 entries)

SEQ ID NO: 2076 - DNA, 18 bp, synthetic construct
  source 1..18: mol_type = other DNA
cgctcgtcaccgcggctg

SEQ ID NO: 2077 - DNA, 18 bp, synthetic construct
  source 1..18: mol_type = other DNA
cagccgcggtgacgagcg

SEQ ID NO: 2078 - DNA, 18 bp, synthetic construct
  source 1..18: mol_type = other DNA
cgctcgtcaccgcggctc

SEQ ID NO: 2079 - DNA, 18 bp, synthetic construct
  source 1..18: mol_type = other DNA
gagccgcggtgacgagcg

SEQ ID NO: 2080 - DNA, 18 bp, synthetic construct
  source 1..18: mol_type = other DNA
cgctcgttaccgcggctg

SEQ ID NO: 2081 - DNA, 18 bp, synthetic construct
  source 1..18: mol_type = other DNA
cagccgcggtaacgagcg

SEQ ID NO: 2082 - DNA, 18 bp, synthetic construct
  source 1..18: mol_type = other DNA
cgctcgttaccgcggctc

SEQ ID NO: 2083 - DNA, 18 bp, synthetic construct
  source 1..18: mol_type = other DNA
gagccgcggtaacgagcg

SEQ ID NO: 2084 - DNA, 18 bp, synthetic construct
  source 1..18: mol_type = other DNA
cgctcctcaccgcggctg

SEQ ID NO: 2085 - DNA, 18 bp, synthetic construct
  source 1..18: mol_type = other DNA
cagccgcggtgaggagcg

SEQ ID NO: 2086 - DNA, 18 bp, synthetic construct
  source 1..18: mol_type = other DNA
cgctcctcaccgcggctc

SEQ ID NO: 2087 - DNA, 18 bp, synthetic construct
  source 1..18: mol_type = other DNA
gagccgcggtgaggagcg

SEQ ID NO: 2088 - DNA, 18 bp, synthetic construct
  source 1..18: mol_type = other DNA
cgctccttaccgcggctg

SEQ ID NO: 2089 - DNA, 18 bp, synthetic construct
  source 1..18: mol_type = other DNA
cagccgcggtaaggagcg

SEQ ID NO: 2090 - DNA, 18 bp, synthetic construct
  source 1..18: mol_type = other DNA
cgctccttaccgcggctc

SEQ ID NO: 2091 - DNA, 18 bp, synthetic construct
  source 1..18: mol_type = other DNA
gagccgcggtaaggagcg

SEQ ID NO: 2092 - DNA, 18 bp, synthetic construct
  source 1..18: mol_type = other DNA
cgcttgtcaccgcggctg

SEQ ID NO: 2093 - DNA, 18 bp, synthetic construct
  source 1..18: mol_type = other DNA
cagccgcggtgacaagcg

SEQ ID NO: 2094 - DNA, 18 bp, synthetic construct
  source 1..18: mol_type = other DNA
cgcttgtcaccgcggctc

SEQ ID NO: 2095 - DNA, 18 bp, synthetic construct
  source 1..18: mol_type = other DNA
gagccgcggtgacaagcg

SEQ ID NO: 2096 - DNA, 18 bp, synthetic construct
  source 1..18: mol_type = other DNA
cgcttgttaccgcggctg

SEQ ID NO: 2097 - DNA, 18 bp, synthetic construct
  source 1..18: mol_type = other DNA
cagccgcggtaacaagcg

SEQ ID NO: 2098 - DNA, 18 bp, synthetic construct
  source 1..18: mol_type = other DNA
cgcttgttaccgcggctc

SEQ ID NO: 2099 - DNA, 18 bp, synthetic construct
  source 1..18: mol_type = other DNA
gagccgcggtaacaagcg

SEQ ID NO: 2100 - DNA, 18 bp, synthetic construct
  source 1..18: mol_type = other DNA
cgcttctcaccgcggctg

SEQ ID NO: 2101 - DNA, 18 bp, synthetic construct
  source 1..18: mol_type = other DNA
cagccgcggtgagaagcg

SEQ ID NO: 2102 - DNA, 18 bp, synthetic construct
  source 1..18: mol_type = other DNA
cgcttctcaccgcggctc

SEQ ID NO: 2103 - DNA, 18 bp, synthetic construct
  source 1..18: mol_type = other DNA
gagccgcggtgagaagcg

SEQ ID NO: 2104 - DNA, 18 bp, synthetic construct
  source 1..18: mol_type = other DNA
cgcttcttaccgcggctg

SEQ ID NO: 2105 - DNA, 18 bp, synthetic construct
  source 1..18: mol_type = other DNA
cagccgcggtaagaagcg

SEQ ID NO: 2106 - DNA, 18 bp, synthetic construct
  source 1..18: mol_type = other DNA
cgcttcttaccgcggctc

SEQ ID NO: 2107 - DNA, 18 bp, synthetic construct
  source 1..18: mol_type = other DNA
gagccgcggtaagaagcg

SEQ ID NO: 2108 - DNA, 18 bp, synthetic construct
  source 1..18: mol_type = other DNA
cgttcgtcaccgcggctg

SEQ ID NO: 2109 - DNA, 18 bp, synthetic construct
  source 1..18: mol_type = other DNA
cagccgcggtgacgaacg

SEQ ID NO: 2110 - DNA, 18 bp, synthetic construct
  source 1..18: mol_type = other DNA
cgttcgtcaccgcggctc

SEQ ID NO: 2111 - DNA, 18 bp, synthetic construct
  source 1..18: mol_type = other DNA
gagccgcggtgacgaacg

SEQ ID NO: 2112 - DNA, 18 bp, synthetic construct
  source 1..18: mol_type = other DNA
cgttcgttaccgcggctg

SEQ ID NO: 2113 - DNA, 18 bp, synthetic construct
  source 1..18: mol_type = other DNA
cagccgcggtaacgaacg

SEQ ID NO: 2114 - DNA, 18 bp, synthetic construct
  source 1..18: mol_type = other DNA
cgttcgttaccgcggctc

SEQ ID NO: 2115 - DNA, 18 bp, synthetic construct
  source 1..18: mol_type = other DNA
gagccgcggtaacgaacg

SEQ ID NO: 2116 - DNA, 18 bp, synthetic construct
  source 1..18: mol_type = other DNA
cgttcctcaccgcggctg

SEQ ID NO: 2117 - DNA, 18 bp, synthetic construct
  source 1..18: mol_type = other DNA
cagccgcggtgaggaacg

SEQ ID NO: 2118 - DNA, 18 bp, synthetic construct
  source 1..18: mol_type = other DNA
cgttcctcaccgcggctc

SEQ ID NO: 2119 - DNA, 18 bp, synthetic construct
  source 1..18: mol_type = other DNA
gagccgcggtgaggaacg

SEQ ID NO: 2120 - DNA, 18 bp, synthetic construct
  source 1..18: mol_type = other DNA
cgttccttaccgcggctg

SEQ ID NO: 2121 - DNA, 18 bp, synthetic construct
  source 1..18: mol_type = other DNA
cagccgcggtaaggaacg

SEQ ID NO: 2122 - DNA, 18 bp, synthetic construct
  source 1..18: mol_type = other DNA
cgttccttaccgcggctc

SEQ ID NO: 2123 - DNA, 18 bp, synthetic construct
  source 1..18: mol_type = other DNA
gagccgcggtaaggaacg

SEQ ID NO: 2124 - DNA, 18 bp, synthetic construct
  source 1..18: mol_type = other DNA
cgtttgtcaccgcggctg

SEQ ID NO: 2125 - DNA, 18 bp, synthetic construct
  source 1..18: mol_type = other DNA
cagccgcggtgacaaacg

SEQ ID NO: 2126 - DNA, 18 bp, synthetic construct
  source 1..18: mol_type = other DNA
cgtttgtcaccgcggctc

SEQ ID NO: 2127 - DNA, 18 bp, synthetic construct
  source 1..18: mol_type = other DNA
gagccgcggtgacaaacg

SEQ ID NO: 2128 - DNA, 18 bp, synthetic construct
  source 1..18: mol_type = other DNA
cgtttgttaccgcggctg

SEQ ID NO: 2129 - DNA, 18 bp, synthetic construct
  source 1..18: mol_type = other DNA
cagccgcggtaacaaacg

SEQ ID NO: 2130 - DNA, 18 bp, synthetic construct
  source 1..18: mol_type = other DNA
cgtttgttaccgcggctc

SEQ ID NO: 2131 - DNA, 18 bp, synthetic construct
  source 1..18: mol_type = other DNA
gagccgcggtaacaaacg

SEQ ID NO: 2132 - DNA, 18 bp, synthetic construct
  source 1..18: mol_type = other DNA
cgtttctcaccgcggctg

SEQ ID NO: 2133 - DNA, 18 bp, synthetic construct
  source 1..18: mol_type = other DNA
cagccgcggtgagaaacg

SEQ ID NO: 2134 - DNA, 18 bp, synthetic construct
  source 1..18: mol_type = other DNA
cgtttctcaccgcggctc

SEQ ID NO: 2135 - DNA, 18 bp, synthetic construct
  source 1..18: mol_type = other DNA
gagccgcggtgagaaacg

SEQ ID NO: 2136 - DNA, 18 bp, synthetic construct
  source 1..18: mol_type = other DNA
cgtttcttaccgcggctg

SEQ ID NO: 2137 - DNA, 18 bp, synthetic construct
  source 1..18: mol_type = other DNA
cagccgcggtaagaaacg

SEQ ID NO: 2138 - DNA, 18 bp, synthetic construct
  source 1..18: mol_type = other DNA
cgtttcttaccgcggctc

SEQ ID NO: 2139 - DNA, 18 bp, synthetic construct
  source 1..18: mol_type = other DNA
gagccgcggtaagaaacg

SEQ ID NO: 2140 - DNA, 18 bp, synthetic construct
  source 1..18: mol_type = other DNA
tgctcgtcaccgcggctg

SEQ ID NO: 2141 - DNA, 18 bp, synthetic construct
  source 1..18: mol_type = other DNA
cagccgcggtgacgagca

SEQ ID NO: 2142 - DNA, 18 bp, synthetic construct
  source 1..18: mol_type = other DNA
tgctcgtcaccgcggctc

SEQ ID NO: 2143 - DNA, 18 bp, synthetic construct
  source 1..18: mol_type = other DNA
gagccgcggtgacgagca

SEQ ID NO: 2144 - DNA, 18 bp, synthetic construct
  source 1..18: mol_type = other DNA
tgctcgttaccgcggctg

SEQ ID NO: 2145 - DNA, 18 bp, synthetic construct
  source 1..18: mol_type = other DNA
cagccgcggtaacgagca

SEQ ID NO: 2146 - DNA, 18 bp, synthetic construct
  source 1..18: mol_type = other DNA
tgctcgttaccgcggctc

SEQ ID NO: 2147 - DNA, 18 bp, synthetic construct
  source 1..18: mol_type = other DNA
gagccgcggtaacgagca

SEQ ID NO: 2148 - DNA, 18 bp, synthetic construct
  source 1..18: mol_type = other DNA
tgctcctcaccgcggctg

SEQ ID NO: 2149 - DNA, 18 bp, synthetic construct
  source 1..18: mol_type = other DNA
cagccgcggtgaggagca

SEQ ID NO: 2150 - DNA, 18 bp, synthetic construct
  source 1..18: mol_type = other DNA
tgctcctcaccgcggctc

SEQ ID NO: 2151 - DNA, 18 bp, synthetic construct
  source 1..18: mol_type = other DNA
gagccgcggtgaggagca

SEQ ID NO: 2152 - DNA, 18 bp, synthetic construct
  source 1..18: mol_type = other DNA
tgctccttaccgcggctg

SEQ ID NO: 2153 - DNA, 18 bp, synthetic construct
  source 1..18: mol_type = other DNA
cagccgcggtaaggagca

SEQ ID NO: 2154 - DNA, 18 bp, synthetic construct
  source 1..18: mol_type = other DNA
tgctccttaccgcggctc

SEQ ID NO: 2155 - DNA, 18 bp, synthetic construct
  source 1..18: mol_type = other DNA
gagccgcggtaaggagca

SEQ ID NO: 2156 - DNA, 18 bp, synthetic construct
  source 1..18: mol_type = other DNA
tgcttgtcaccgcggctg

SEQ ID NO: 2157 - DNA, 18 bp, synthetic construct
  source 1..18: mol_type = other DNA
cagccgcggtgacaagca

SEQ ID NO: 2158 - DNA, 18 bp, synthetic construct
  source 1..18: mol_type = other DNA
tgcttgtcaccgcggctc

SEQ ID NO: 2159 - DNA, 18 bp, synthetic construct
  source 1..18: mol_type = other DNA
gagccgcggtgacaagca

SEQ ID NO: 2160 - DNA, 18 bp, synthetic construct
  source 1..18: mol_type = other DNA
tgcttgttaccgcggctg

SEQ ID NO: 2161 - DNA, 18 bp, synthetic construct
  source 1..18: mol_type = other DNA
cagccgcggtaacaagca

SEQ ID NO: 2162 - DNA, 18 bp, synthetic construct
  source 1..18: mol_type = other DNA
tgcttgttaccgcggctc

SEQ ID NO: 2163 - DNA, 18 bp, synthetic construct
  source 1..18: mol_type = other DNA
gagccgcggtaacaagca

SEQ ID NO: 2164 - DNA, 18 bp, synthetic construct
  source 1..18: mol_type = other DNA
tgcttctcaccgcggctg

SEQ ID NO: 2165 - DNA, 18 bp, synthetic construct
  source 1..18: mol_type = other DNA
cagccgcggtgagaagca

SEQ ID NO: 2166 - DNA, 18 bp, synthetic construct
  source 1..18: mol_type = other DNA
tgcttctcaccgcggctc

SEQ ID NO: 2167 - DNA, 18 bp, synthetic construct
  source 1..18: mol_type = other DNA
gagccgcggtgagaagca

SEQ ID NO: 2168 - DNA, 18 bp, synthetic construct
  source 1..18: mol_type = other DNA
tgcttcttaccgcggctg

SEQ ID NO: 2169 - DNA, 18 bp, synthetic construct
  source 1..18: mol_type = other DNA
cagccgcggtaagaagca

SEQ ID NO: 2170 - DNA, 18 bp, synthetic construct
  source 1..18: mol_type = other DNA
tgcttcttaccgcggctc

SEQ ID NO: 2171 - DNA, 18 bp, synthetic construct
  source 1..18: mol_type = other DNA
gagccgcggtaagaagca

SEQ ID NO: 2172 - DNA, 18 bp, synthetic construct
  source 1..18: mol_type = other DNA
tgttcgtcaccgcggctg

SEQ ID NO: 2173 - DNA, 18 bp, synthetic construct
  source 1..18: mol_type = other DNA
cagccgcggtgacgaaca

SEQ ID NO: 2174 - DNA, 18 bp, synthetic construct
  source 1..18: mol_type = other DNA
tgttcgtcaccgcggctc

SEQ ID NO: 2175 - DNA, 18 bp, synthetic construct
  source 1..18: mol_type = other DNA
gagccgcggtgacgaaca

SEQ ID NO: 2176 - DNA, 18 bp, synthetic construct
  source 1..18: mol_type = other DNA
tgttcgttaccgcggctg

SEQ ID NO: 2177 - DNA, 18 bp, synthetic construct
  source 1..18: mol_type = other DNA
cagccgcggtaacgaaca

SEQ ID NO: 2178 - DNA, 18 bp, synthetic construct
  source 1..18: mol_type = other DNA
tgttcgttaccgcggctc

SEQ ID NO: 2179 - DNA, 18 bp, synthetic construct
  source 1..18: mol_type = other DNA
gagccgcggtaacgaaca

SEQ ID NO: 2180 - DNA, 18 bp, synthetic construct
  source 1..18: mol_type = other DNA
tgttcctcaccgcggctg

SEQ ID NO: 2181 - DNA, 18 bp, synthetic construct
  source 1..18: mol_type = other DNA
cagccgcggtgaggaaca

SEQ ID NO: 2182 - DNA, 18 bp, synthetic construct
  source 1..18: mol_type = other DNA
tgttcctcaccgcggctc

SEQ ID NO: 2183 - DNA, 18 bp, synthetic construct
  source 1..18: mol_type = other DNA
gagccgcggtgaggaaca

SEQ ID NO: 2184 - DNA, 18 bp, synthetic construct
  source 1..18: mol_type = other DNA
tgttccttaccgcggctg

SEQ ID NO: 2185 - DNA, 18 bp, synthetic construct
  source 1..18: mol_type = other DNA
cagccgcggtaaggaaca

SEQ ID NO: 2186 - DNA, 18 bp, synthetic construct
  source 1..18: mol_type = other DNA
tgttccttaccgcggctc

SEQ ID NO: 2187 - DNA, 18 bp, synthetic construct
  source 1..18: mol_type = other DNA
gagccgcggtaaggaaca

SEQ ID NO: 2188 - DNA, 18 bp, synthetic construct
  source 1..18: mol_type = other DNA
tgtttgtcaccgcggctg

SEQ ID NO: 2189 - DNA, 18 bp, synthetic construct
  source 1..18: mol_type = other DNA
cagccgcggtgacaaaca

SEQ ID NO: 2190 - DNA, 18 bp, synthetic construct
  source 1..18: mol_type = other DNA
tgtttgtcaccgcggctc

SEQ ID NO: 2191 - DNA, 18 bp, synthetic construct
  source 1..18: mol_type = other DNA
gagccgcggtgacaaaca

SEQ ID NO: 2192 - DNA, 18 bp, synthetic construct
  source 1..18: mol_type = other DNA
tgtttgttaccgcggctg

SEQ ID NO: 2193 - DNA, 18 bp, synthetic construct
  source 1..18: mol_type = other DNA
cagccgcggtaacaaaca

SEQ ID NO: 2194 - DNA, 18 bp, synthetic construct
  source 1..18: mol_type = other DNA
tgtttgttaccgcggctc

SEQ ID NO: 2195 - DNA, 18 bp, synthetic construct
  source 1..18: mol_type = other DNA
gagccgcggtaacaaaca

SEQ ID NO: 2196 - DNA, 18 bp, synthetic construct
  source 1..18: mol_type = other DNA
tgtttctcaccgcggctg

SEQ ID NO: 2197 - DNA, 18 bp, synthetic construct
  source 1..18: mol_type = other DNA
cagccgcggtgagaaaca

SEQ ID NO: 2198 - DNA, 18 bp, synthetic construct
  source 1..18: mol_type = other DNA
tgtttctcaccgcggctc

SEQ ID NO: 2199 - DNA, 18 bp, synthetic construct
  source 1..18: mol_type = other DNA
gagccgcggtgagaaaca

SEQ ID NO: 2200 - DNA, 18 bp, synthetic construct
  source 1..18: mol_type = other DNA
tgtttcttaccgcggctg

SEQ ID NO: 2201 - DNA, 18 bp, synthetic construct
  source 1..18: mol_type = other DNA
cagccgcggtaagaaaca

SEQ ID NO: 2202 - DNA, 18 bp, synthetic construct
  source 1..18: mol_type = other DNA
tgtttcttaccgcggctc

SEQ ID NO: 2203 - DNA, 18 bp, synthetic construct
  source 1..18: mol_type = other DNA
gagccgcggtaagaaaca

SEQ ID NO: 2204 - DNA, 12 bp, synthetic construct
  source 1..12: mol_type = other DNA
aagggcggggcc

SEQ ID NO: 2205 - DNA, 12 bp, synthetic construct
  source 1..12: mol_type = other DNA
ggccccgccctt

SEQ ID NO: 2206 - DNA, 12 bp, synthetic construct
  source 1..12: mol_type = other DNA
aagggcggggct

SEQ ID NO: 2207 - DNA, 12 bp, synthetic construct
  source 1..12: mol_type = other DNA
agccccgccctt

SEQ ID NO: 2208 - DNA, 12 bp, synthetic construct
  source 1..12: mol_type = other DNA
aagggtggggcc

SEQ ID NO: 2209 - DNA, 12 bp, synthetic construct
  source 1..12: mol_type = other DNA
ggccccaccctt

SEQ ID NO: 2210 - DNA, 12 bp, synthetic construct
  source 1..12: mol_type = other DNA
aagggtggggct

SEQ ID NO: 2211 - DNA, 12 bp, synthetic construct
  source 1..12: mol_type = other DNA
agccccaccctt

SEQ ID NO: 2212 - DNA, 12 bp, synthetic construct
  source 1..12: mol_type = other DNA
aggggcggggcc

SEQ ID NO: 2213 - DNA, 12 bp, synthetic construct
  source 1..12: mol_type = other DNA
ggccccgcccct

SEQ ID NO: 2214 - DNA, 12 bp, synthetic construct
  source 1..12: mol_type = other DNA
aggggcggggct

SEQ ID NO: 2215 - DNA, 12 bp, synthetic construct
  source 1..12: mol_type = other DNA
agccccgcccct

SEQ ID NO: 2216 - DNA, 12 bp, synthetic construct
  source 1..12: mol_type = other DNA
aggggtggggcc

SEQ ID NO: 2217 - DNA, 12 bp, synthetic construct
  source 1..12: mol_type = other DNA
ggccccacccct

SEQ ID NO: 2218 - DNA, 12 bp, synthetic construct
  source 1..12: mol_type = other DNA
aggggtggggct

SEQ ID NO: 2219 - DNA, 12 bp, synthetic construct
  source 1..12: mol_type = other DNA
agccccacccct

SEQ ID NO: 2220 - DNA, 12 bp, synthetic construct
  source 1..12: mol_type = other DNA
atgggcggggcc

SEQ ID NO: 2221 - DNA, 12 bp, synthetic construct
  source 1..12: mol_type = other DNA
ggccccgcccat

SEQ ID NO: 2222 - DNA, 12 bp, synthetic construct
  source 1..12: mol_type = other DNA
atgggcggggct

SEQ ID NO: 2223 - DNA, 12 bp, synthetic construct
  source 1..12: mol_type = other DNA
agccccgcccat

SEQ ID NO: 2224 - DNA, 12 bp, synthetic construct
  source 1..12: mol_type = other DNA
atgggtggggcc

SEQ ID NO: 2225 - DNA, 12 bp, synthetic construct
  source 1..12: mol_type = other DNA
ggccccacccat

SEQ ID NO: 2226 - DNA, 12 bp, synthetic construct
  source 1..12: mol_type = other DNA
atgggtggggct

SEQ ID NO: 2227 - DNA, 12 bp, synthetic construct
  source 1..12: mol_type = other DNA
agccccacccat

SEQ ID NO: 2228 - DNA, 12 bp, synthetic construct
  source 1..12: mol_type = other DNA
cagggcggggcc

SEQ ID NO: 2229 - DNA, 12 bp, synthetic construct
  source 1..12: mol_type = other DNA
ggccccgccctg

SEQ ID NO: 2230 - DNA, 12 bp, synthetic construct
  source 1..12: mol_type = other DNA
cagggcggggct

SEQ ID NO: 2231 - DNA, 12 bp, synthetic construct
  source 1..12: mol_type = other DNA
agccccgccctg

SEQ ID NO: 2232 - DNA, 12 bp, synthetic construct
  source 1..12: mol_type = other DNA
cagggtggggcc

SEQ ID NO: 2233 - DNA, 12 bp, synthetic construct
  source 1..12: mol_type = other DNA
ggccccaccctg

SEQ ID NO: 2234 - DNA, 12 bp, synthetic construct
  source 1..12: mol_type = other DNA
cagggtggggct

SEQ ID NO: 2235 - DNA, 12 bp, synthetic construct
  source 1..12: mol_type = other DNA
agccccaccctg

SEQ ID NO: 2236 - DNA, 12 bp, synthetic construct
  source 1..12: mol_type = other DNA
cggggcggggcc

SEQ ID NO: 2237 - DNA, 12 bp, synthetic construct
  source 1..12: mol_type = other DNA
ggccccgccccg

SEQ ID NO: 2238 - DNA, 12 bp, synthetic construct
  source 1..12: mol_type = other DNA
cggggcggggct

SEQ ID NO: 2239 - DNA, 12 bp, synthetic construct
  source 1..12: mol_type = other DNA
agccccgccccg

SEQ ID NO: 2240 - DNA, 12 bp, synthetic construct
  source 1..12: mol_type = other DNA
cggggtggggcc

SEQ ID NO: 2241 - DNA, 12 bp, synthetic construct
  source 1..12: mol_type = other DNA
ggccccaccccg

SEQ ID NO: 2242 - DNA, 12 bp, synthetic construct
  source 1..12: mol_type = other DNA
cggggtggggct

SEQ ID NO: 2243 - DNA, 12 bp, synthetic construct
  source 1..12: mol_type = other DNA
agccccaccccg

SEQ ID NO: 2244 - DNA, 12 bp, synthetic construct
  source 1..12: mol_type = other DNA
ctgggcggggcc

SEQ ID NO: 2245 - DNA, 12 bp, synthetic construct
  source 1..12: mol_type = other DNA
ggccccgcccag

SEQ ID NO: 2246 - DNA, 12 bp, synthetic construct
  source 1..12: mol_type = other DNA
ctgggcggggct

SEQ ID NO: 2247 - DNA, 12 bp, synthetic construct
  source 1..12: mol_type = other DNA
agccccgcccag

SEQ ID NO: 2248 - DNA, 12 bp, synthetic construct
  source 1..12: mol_type = other DNA
ctgggtggggcc

SEQ ID NO: 2249 - DNA, 12 bp, synthetic construct
  source 1..12: mol_type = other DNA
ggccccacccag

SEQ ID NO: 2250 - DNA, 12 bp, synthetic construct
  source 1..12: mol_type = other DNA
ctgggtggggct

SEQ ID NO: 2251 - DNA, 12 bp, synthetic construct
  source 1..12: mol_type = other DNA
agccccacccag

SEQ ID NO: 2252 - DNA, 12 bp, synthetic construct
  source 1..12: mol_type = other DNA
gagggcggggcc

SEQ ID NO: 2253 - DNA, 12 bp, synthetic construct
  source 1..12: mol_type = other DNA
ggccccgccctc

SEQ ID NO: 2254 - DNA, 12 bp, synthetic construct
  source 1..12: mol_type = other DNA
gagggcggggct

SEQ ID NO: 2255 - DNA, 12 bp, synthetic construct
  source 1..12: mol_type = other DNA
agccccgccctc

SEQ ID NO: 2256 - DNA, 12 bp, synthetic construct
  source 1..12: mol_type = other DNA
gagggtggggcc

SEQ ID NO: 2257 - DNA, 12 bp, synthetic construct
  source 1..12: mol_type = other DNA
ggccccaccctc

SEQ ID NO: 2258 - DNA, 12 bp, synthetic construct
  source 1..12: mol_type = other DNA
gagggtggggct

SEQ ID NO: 2259 - DNA, 12 bp, synthetic construct
  source 1..12: mol_type = other DNA
agccccaccctc

SEQ ID NO: 2260 - DNA, 12 bp, synthetic construct
  source 1..12: mol_type = other DNA
gggggcggggcc

SEQ ID NO: 2261 - DNA, 12 bp, synthetic construct
  source 1..12: mol_type = other DNA
ggccccgccccc

SEQ ID NO: 2262 - DNA, 12 bp, synthetic construct
  source 1..12: mol_type = other DNA
gggggcggggct

SEQ ID NO: 2263 - DNA, 12 bp, synthetic construct
  source 1..12: mol_type = other DNA
agccccgccccc

SEQ ID NO: 2264 - DNA, 12 bp, synthetic construct
  source 1..12: mol_type = other DNA
gggggtggggcc

SEQ ID NO: 2265 - DNA, 12 bp, synthetic construct
  source 1..12: mol_type = other DNA
ggccccaccccc

SEQ ID NO: 2266 - DNA, 12 bp, synthetic construct
  source 1..12: mol_type = other DNA
gggggtggggct

SEQ ID NO: 2267 - DNA, 12 bp, synthetic construct
  source 1..12: mol_type = other DNA
agccccaccccc

SEQ ID NO: 2268 - DNA, 12 bp, synthetic construct
  source 1..12: mol_type = other DNA
gtgggcggggcc

SEQ ID NO: 2269 - DNA, 12 bp, synthetic construct
  source 1..12: mol_type = other DNA
ggccccgcccac

SEQ ID NO: 2270 - DNA, 12 bp, synthetic construct
  source 1..12: mol_type = other DNA
gtgggcggggct

SEQ ID NO: 2271 - DNA, 12 bp, synthetic construct
  source 1..12: mol_type = other DNA
agccccgcccac

SEQ ID NO: 2272 - DNA, 12 bp, synthetic construct
  source 1..12: mol_type = other DNA
gtgggtggggcc

SEQ ID NO: 2273 - DNA, 12 bp, synthetic construct
  source 1..12: mol_type = other DNA
ggccccacccac

SEQ ID NO: 2274 - DNA, 12 bp, synthetic construct
  source 1..12: mol_type = other DNA
gtgggtggggct

SEQ ID NO: 2275 - DNA, 12 bp, synthetic construct
  source 1..12: mol_type = other DNA
agccccacccac

SEQ ID NO: 2276-2277 - skipped (2 entries)

SEQ ID NO: 2278 - DNA, 12 bp, synthetic construct
  source 1..12: mol_type = other DNA
agggggcggagc

SEQ ID NO: 2279 - DNA, 12 bp, synthetic construct
  source 1..12: mol_type = other DNA
gctccgccccct

SEQ ID NO: 2280 - DNA, 12 bp, synthetic construct
  source 1..12: mol_type = other DNA
agtgggcggagc

SEQ ID NO: 2281 - DNA, 12 bp, synthetic construct
  source 1..12: mol_type = other DNA
gctccgcccact

SEQ ID NO: 2282 - DNA, 12 bp, synthetic construct
  source 1..12: mol_type = other DNA
ggggggcggagc

SEQ ID NO: 2283 - DNA, 12 bp, synthetic construct
  source 1..12: mol_type = other DNA
gctccgcccccc

SEQ ID NO: 2284 - DNA, 12 bp, synthetic construct
  source 1..12: mol_type = other DNA
ggtgggcggagc

SEQ ID NO: 2285 - DNA, 12 bp, synthetic construct
  source 1..12: mol_type = other DNA
gctccgcccacc

SEQ ID NO: 2286 - DNA, 14 bp, synthetic construct
  source 1..14: mol_type = other DNA
aaccgcaaaccgca

SEQ ID NO: 2287 - DNA, 14 bp, synthetic construct
  source 1..14: mol_type = other DNA
tgcggtttgcggtt

SEQ ID NO: 2288 - DNA, 14 bp, synthetic construct
  source 1..14: mol_type = other DNA
gaccgcaaaccgca

SEQ ID NO: 2289 - DNA, 14 bp, synthetic construct
  source 1..14: mol_type = other DNA
tgcggtttgcggtc

SEQ ID NO: 2290-2291 - skipped (2 entries)

SEQ ID NO: 2292 - DNA, 12 bp, synthetic construct
  source 1..12: mol_type = other DNA
acaggatgtggt

SEQ ID NO: 2293 - DNA, 12 bp, synthetic construct
  source 1..12: mol_type = other DNA
accacatcctgt

SEQ ID NO: 2294-2509 - skipped (216 entries)

SEQ ID NO: 2510 - DNA, 10 bp, synthetic construct
  source 1..10: mol_type = other DNA
tcaaggtcaa

SEQ ID NO: 2511 - DNA, 10 bp, synthetic construct
  source 1..10: mol_type = other DNA
ttgaccttga

SEQ ID NO: 2512 - DNA, 10 bp, synthetic construct
  source 1..10: mol_type = other DNA
tcaaggtcat

SEQ ID NO: 2513 - DNA, 10 bp, synthetic construct
  source 1..10: mol_type = other DNA
atgaccttga

SEQ ID NO: 2514 - DNA, 11 bp, synthetic construct
  source 1..11: mol_type = other DNA
cccgcgtcctt

SEQ ID NO: 2515 - DNA, 11 bp, synthetic construct
  source 1..11: mol_type = other DNA
aaggacgcggg

SEQ ID NO: 2516 - DNA, 11 bp, synthetic construct
  source 1..11: mol_type = other DNA
tccgcgtcctt

SEQ ID NO: 2517 - DNA, 11 bp, synthetic construct
  source 1..11: mol_type = other DNA
aaggacgcgga

SEQ ID NO: 2518 - DNA, 13 bp, synthetic construct
  source 1..13: mol_type = other DNA
agcacaaaggcca

SEQ ID NO: 2519 - DNA, 13 bp, synthetic construct
  source 1..13: mol_type = other DNA
tggcctttgtgct

SEQ ID NO: 2520 - DNA, 13 bp, synthetic construct
  source 1..13: mol_type = other DNA
agcacaaaggtca

SEQ ID NO: 2521 - DNA, 13 bp, synthetic construct
  source 1..13: mol_type = other DNA
tgacctttgtgct

SEQ ID NO: 2522 - DNA, 13 bp, synthetic construct
  source 1..13: mol_type = other DNA
agcacaaagtcca

SEQ ID NO: 2523 - DNA, 13 bp, synthetic construct
  source 1..13: mol_type = other DNA
tggactttgtgct

SEQ ID NO: 2524 - DNA, 13 bp, synthetic construct
  source 1..13: mol_type = other DNA
agcacaaagttca

SEQ ID NO: 2525 - DNA, 13 bp, synthetic construct
  source 1..13: mol_type = other DNA
tgaactttgtgct

SEQ ID NO: 2526 - DNA, 13 bp, synthetic construct
  source 1..13: mol_type = other DNA
ggcacaaaggcca

SEQ ID NO: 2527 - DNA, 13 bp, synthetic construct
  source 1..13: mol_type = other DNA
tggcctttgtgcc

SEQ ID NO: 2528 - DNA, 13 bp, synthetic construct
  source 1..13: mol_type = other DNA
ggcacaaaggtca

SEQ ID NO: 2529 - DNA, 13 bp, synthetic construct
  source 1..13: mol_type = other DNA
tgacctttgtgcc

SEQ ID NO: 2530 - DNA, 13 bp, synthetic construct
  source 1..13: mol_type = other DNA
ggcacaaagtcca

SEQ ID NO: 2531 - DNA, 13 bp, synthetic construct
  source 1..13: mol_type = other DNA
tggactttgtgcc

SEQ ID NO: 2532 - DNA, 13 bp, synthetic construct
  source 1..13: mol_type = other DNA
ggcacaaagttca

SEQ ID NO: 2533 - DNA, 13 bp, synthetic construct
  source 1..13: mol_type = other DNA
tgaactttgtgcc

SEQ ID NO: 2534-2539 - skipped (6 entries)

SEQ ID NO: 2540 - DNA, 12 bp, synthetic construct
  source 1..12: mol_type = other DNA
atgccctgaggc

SEQ ID NO: 2541 - DNA, 12 bp, synthetic construct
  source 1..12: mol_type = other DNA
gcctcagggcat

SEQ ID NO: 2542-2545 - skipped (4 entries)

SEQ ID NO: 2546 - DNA, 14 bp, synthetic construct
  source 1..14: mol_type = other DNA
cgccacctagtggc

SEQ ID NO: 2547 - DNA, 14 bp, synthetic construct
  source 1..14: mol_type = other DNA
gccactaggtggcg

SEQ ID NO: 2548 - DNA, 14 bp, synthetic construct
  source 1..14: mol_type = other DNA
cgccacctactggc

SEQ ID NO: 2549 - DNA, 14 bp, synthetic construct
  source 1..14: mol_type = other DNA
gccagtaggtggcg

SEQ ID NO: 2550 - DNA, 14 bp, synthetic construct
  source 1..14: mol_type = other DNA
cgccacctggtggc

SEQ ID NO: 2551 - DNA, 14 bp, synthetic construct
  source 1..14: mol_type = other DNA
gccaccaggtggcg

SEQ ID NO: 2552 - DNA, 14 bp, synthetic construct
  source 1..14: mol_type = other DNA
cgccacctgctggc

SEQ ID NO: 2553 - DNA, 14 bp, synthetic construct
  source 1..14: mol_type = other DNA
gccagcaggtggcg

SEQ ID NO: 2554 - DNA, 14 bp, synthetic construct
  source 1..14: mol_type = other DNA
cgccaccttgtggc

SEQ ID NO: 2555 - DNA, 14 bp, synthetic construct
  source 1..14: mol_type = other DNA
gccacaaggtggcg

SEQ ID NO: 2556 - DNA, 14 bp, synthetic construct
  source 1..14: mol_type = other DNA
cgccaccttctggc

SEQ ID NO: 2557 - DNA, 14 bp, synthetic construct
  source 1..14: mol_type = other DNA
gccagaaggtggcg

SEQ ID NO: 2558 - DNA, 14 bp, synthetic construct
  source 1..14: mol_type = other DNA
cgccatctagtggc

SEQ ID NO: 2559 - DNA, 14 bp, synthetic construct
  source 1..14: mol_type = other DNA
gccactagatggcg

SEQ ID NO: 2560 - DNA, 14 bp, synthetic construct
  source 1..14: mol_type = other DNA
cgccatctactggc

SEQ ID NO: 2561 - DNA, 14 bp, synthetic construct
  source 1..14: mol_type = other DNA
gccagtagatggcg

SEQ ID NO: 2562 - DNA, 14 bp, synthetic construct
  source 1..14: mol_type = other DNA
cgccatctggtggc

SEQ ID NO: 2563 - DNA, 14 bp, synthetic construct
  source 1..14: mol_type = other DNA
gccaccagatggcg

SEQ ID NO: 2564 - DNA, 14 bp, synthetic construct
  source 1..14: mol_type = other DNA
cgccatctgctggc

SEQ ID NO: 2565 - DNA, 14 bp, synthetic construct
  source 1..14: mol_type = other DNA
gccagcagatggcg

SEQ ID NO: 2566 - DNA, 14 bp, synthetic construct
  source 1..14: mol_type = other DNA
cgccatcttgtggc

SEQ ID NO: 2567 - DNA, 14 bp, synthetic construct
  source 1..14: mol_type = other DNA
gccacaagatggcg

SEQ ID NO: 2568 - DNA, 14 bp, synthetic construct
  source 1..14: mol_type = other DNA
cgccatcttctggc

SEQ ID NO: 2569 - DNA, 14 bp, synthetic construct
  source 1..14: mol_type = other DNA
gccagaagatggcg

SEQ ID NO: 2570 - DNA, 14 bp, synthetic construct
  source 1..14: mol_type = other DNA
cgccccctagtggc

SEQ ID NO: 2571 - DNA, 14 bp, synthetic construct
  source 1..14: mol_type = other DNA
gccactagggggcg

SEQ ID NO: 2572 - DNA, 14 bp, synthetic construct
  source 1..14: mol_type = other DNA
cgccccctactggc

SEQ ID NO: 2573 - DNA, 14 bp, synthetic construct
  source 1..14: mol_type = other DNA
gccagtagggggcg

SEQ ID NO: 2574 - DNA, 14 bp, synthetic construct
  source 1..14: mol_type = other DNA
cgccccctggtggc

SEQ ID NO: 2575 - DNA, 14 bp, synthetic construct
  source 1..14: mol_type = other DNA
gccaccagggggcg

SEQ ID NO: 2576 - DNA, 14 bp, synthetic construct
  source 1..14: mol_type = other DNA
cgccccctgctggc

SEQ ID NO: 2577 - DNA, 14 bp, synthetic construct
  source 1..14: mol_type = other DNA
gccagcagggggcg

SEQ ID NO: 2578 - DNA, 14 bp, synthetic construct
  source 1..14: mol_type = other DNA
cgcccccttgtggc

SEQ ID NO: 2579 - DNA, 14 bp, synthetic construct
  source 1..14: mol_type = other DNA
gccacaagggggcg

SEQ ID NO: 2580 - DNA, 14 bp, synthetic construct
  source 1..14: mol_type = other DNA
cgcccccttctggc

SEQ ID NO: 2581 - DNA, 14 bp, synthetic construct
  source 1..14: mol_type = other DNA
gccagaagggggcg

SEQ ID NO: 2582 - DNA, 14 bp, synthetic construct
  source 1..14: mol_type = other DNA
cgccctctagtggc

SEQ ID NO: 2583 - DNA, 14 bp, synthetic construct
  source 1..14: mol_type = other DNA
gccactagagggcg

SEQ ID NO: 2584 - DNA, 14 bp, synthetic construct
  source 1..14: mol_type = other DNA
cgccctctactggc

SEQ ID NO: 2585 - DNA, 14 bp, synthetic construct
  source 1..14: mol_type = other DNA
gccagtagagggcg

SEQ ID NO: 2586 - DNA, 14 bp, synthetic construct
  source 1..14: mol_type = other DNA
cgccctctggtggc

SEQ ID NO: 2587 - DNA, 14 bp, synthetic construct
  source 1..14: mol_type = other DNA
gccaccagagggcg

SEQ ID NO: 2588 - DNA, 14 bp, synthetic construct
  source 1..14: mol_type = other DNA
cgccctctgctggc

SEQ ID NO: 2589 - DNA, 14 bp, synthetic construct
  source 1..14: mol_type = other DNA
gccagcagagggcg

SEQ ID NO: 2590 - DNA, 14 bp, synthetic construct
  source 1..14: mol_type = other DNA
cgccctcttgtggc

SEQ ID NO: 2591 - DNA, 14 bp, synthetic construct
  source 1..14: mol_type = other DNA
gccacaagagggcg

SEQ ID NO: 2592 - DNA, 14 bp, synthetic construct
  source 1..14: mol_type = other DNA
cgccctcttctggc

SEQ ID NO: 2593 - DNA, 14 bp, synthetic construct
  source 1..14: mol_type = other DNA
gccagaagagggcg

SEQ ID NO: 2594 - DNA, 14 bp, synthetic construct
  source 1..14: mol_type = other DNA
tgccacctagtggc

SEQ ID NO: 2595 - DNA, 14 bp, synthetic construct
  source 1..14: mol_type = other DNA
gccactaggtggca

SEQ ID NO: 2596 - DNA, 14 bp, synthetic construct
  source 1..14: mol_type = other DNA
tgccacctactggc

SEQ ID NO: 2597 - DNA, 14 bp, synthetic construct
  source 1..14: mol_type = other DNA
gccagtaggtggca

SEQ ID NO: 2598 - DNA, 14 bp, synthetic construct
  source 1..14: mol_type = other DNA
tgccacctggtggc

SEQ ID NO: 2599 - DNA, 14 bp, synthetic construct
  source 1..14: mol_type = other DNA
gccaccaggtggca

SEQ ID NO: 2600 - DNA, 14 bp, synthetic construct
  source 1..14: mol_type = other DNA
tgccacctgctggc

SEQ ID NO: 2601 - DNA, 14 bp, synthetic construct
  source 1..14: mol_type = other DNA
gccagcaggtggca

SEQ ID NO: 2602 - DNA, 14 bp, synthetic construct
  source 1..14: mol_type = other DNA
tgccaccttgtggc

SEQ ID NO: 2603 - DNA, 14 bp, synthetic construct
  source 1..14: mol_type = other DNA
gccacaaggtggca

SEQ ID NO: 2604 - DNA, 14 bp, synthetic construct
  source 1..14: mol_type = other DNA
tgccaccttctggc

SEQ ID NO: 2605 - DNA, 14 bp, synthetic construct
  source 1..14: mol_type = other DNA
gccagaaggtggca

SEQ ID NO: 2606 - DNA, 14 bp, synthetic construct
  source 1..14: mol_type = other DNA
tgccatctagtggc

SEQ ID NO: 2607 - DNA, 14 bp, synthetic construct
  source 1..14: mol_type = other DNA
gccactagatggca

SEQ ID NO: 2608 - DNA, 14 bp, synthetic construct
  source 1..14: mol_type = other DNA
tgccatctactggc

SEQ ID NO: 2609 - DNA, 14 bp, synthetic construct
  source 1..14: mol_type = other DNA
gccagtagatggca

SEQ ID NO: 2610 - DNA, 14 bp, synthetic construct
  source 1..14: mol_type = other DNA
tgccatctggtggc

SEQ ID NO: 2611 - DNA, 14 bp, synthetic construct
  source 1..14: mol_type = other DNA
gccaccagatggca

SEQ ID NO: 2612 - DNA, 14 bp, synthetic construct
  source 1..14: mol_type = other DNA
tgccatctgctggc

SEQ ID NO: 2613 - DNA, 14 bp, synthetic construct
  source 1..14: mol_type = other DNA
gccagcagatggca

SEQ ID NO: 2614 - DNA, 14 bp, synthetic construct
  source 1..14: mol_type = other DNA
tgccatcttgtggc

SEQ ID NO: 2615 - DNA, 14 bp, synthetic construct
  source 1..14: mol_type = other DNA
gccacaagatggca

SEQ ID NO: 2616 - DNA, 14 bp, synthetic construct
  source 1..14: mol_type = other DNA
tgccatcttctggc

SEQ ID NO: 2617 - DNA, 14 bp, synthetic construct
  source 1..14: mol_type = other DNA
gccagaagatggca

SEQ ID NO: 2618 - DNA, 14 bp, synthetic construct
  source 1..14: mol_type = other DNA
tgccccctagtggc

SEQ ID NO: 2619 - DNA, 14 bp, synthetic construct
  source 1..14: mol_type = other DNA
gccactagggggca

SEQ ID NO: 2620 - DNA, 14 bp, synthetic construct
  source 1..14: mol_type = other DNA
tgccccctactggc

SEQ ID NO: 2621 - DNA, 14 bp, synthetic construct
  source 1..14: mol_type = other DNA
gccagtagggggca

SEQ ID NO: 2622 - DNA, 14 bp, synthetic construct
  source 1..14: mol_type = other DNA
tgccccctggtggc

SEQ ID NO: 2623 - DNA, 14 bp, synthetic construct
  source 1..14: mol_type = other DNA
gccaccagggggca

SEQ ID NO: 2624 - DNA, 14 bp, synthetic construct
  source 1..14: mol_type = other DNA
tgccccctgctggc

SEQ ID NO: 2625 - DNA, 14 bp, synthetic construct
  source 1..14: mol_type = other DNA
gccagcagggggca

SEQ ID NO: 2626 - DNA, 14 bp, synthetic construct
  source 1..14: mol_type = other DNA
tgcccccttgtggc

SEQ ID NO: 2627 - DNA, 14 bp, synthetic construct
  source 1..14: mol_type = other DNA
gccacaagggggca

SEQ ID NO: 2628 - DNA, 14 bp, synthetic construct
  source 1..14: mol_type = other DNA
tgcccccttctggc

SEQ ID NO: 2629 - DNA, 14 bp, synthetic construct
  source 1..14: mol_type = other DNA
gccagaagggggca

SEQ ID NO: 2630 - DNA, 14 bp, synthetic construct
  source 1..14: mol_type = other DNA
tgccctctagtggc

SEQ ID NO: 2631 - DNA, 14 bp, synthetic construct
  source 1..14: mol_type = other DNA
gccactagagggca

SEQ ID NO: 2632 - DNA, 14 bp, synthetic construct
  source 1..14: mol_type = other DNA
tgccctctactggc

SEQ ID NO: 2633 - DNA, 14 bp, synthetic construct
  source 1..14: mol_type = other DNA
gccagtagagggca

SEQ ID NO: 2634 - DNA, 14 bp, synthetic construct
  source 1..14: mol_type = other DNA
tgccctctggtggc

SEQ ID NO: 2635 - DNA, 14 bp, synthetic construct
  source 1..14: mol_type = other DNA
gccaccagagggca

SEQ ID NO: 2636 - DNA, 14 bp, synthetic construct
  source 1..14: mol_type = other DNA
tgccctctgctggc

SEQ ID NO: 2637 - DNA, 14 bp, synthetic construct
  source 1..14: mol_type = other DNA
gccagcagagggca

SEQ ID NO: 2638 - DNA, 14 bp, synthetic construct
  source 1..14: mol_type = other DNA
tgccctcttgtggc

SEQ ID NO: 2639 - DNA, 14 bp, synthetic construct
  source 1..14: mol_type = other DNA
gccacaagagggca

SEQ ID NO: 2640 - DNA, 14 bp, synthetic construct
  source 1..14: mol_type = other DNA
tgccctcttctggc

SEQ ID NO: 2641 - DNA, 14 bp, synthetic construct
  source 1..14: mol_type = other DNA
gccagaagagggca

SEQ ID NO: 2642 - DNA, 15 bp, synthetic construct
  source 1..15: mol_type = other DNA
tgttgcctagcaaca

SEQ ID NO: 2643 - DNA, 15 bp, synthetic construct
  source 1..15: mol_type = other DNA
tgttgctaggcaaca

SEQ ID NO: 2644 - DNA, 15 bp, synthetic construct
  source 1..15: mol_type = other DNA
tgttgcctagcaacc

SEQ ID NO: 2645 - DNA, 15 bp, synthetic construct
  source 1..15: mol_type = other DNA
ggttgctaggcaaca

SEQ ID NO: 2646 - DNA, 15 bp, synthetic construct
  source 1..15: mol_type = other DNA
tgtttcctagcaaca

SEQ ID NO: 2647 - DNA, 15 bp, synthetic construct
  source 1..15: mol_type = other DNA
tgttgctaggaaaca

SEQ ID NO: 2648 - DNA, 15 bp, synthetic construct
  source 1..15: mol_type = other DNA
tgtttcctagcaacc

SEQ ID NO: 2649 - DNA, 15 bp, synthetic construct
  source 1..15: mol_type = other DNA
ggttgctaggaaaca

SEQ ID NO: 2650 - DNA, 20 bp, synthetic construct
  source 1..20: mol_type = other DNA
gacagtcagagggaggaggc

SEQ ID NO: 2651 - DNA, 20 bp, synthetic construct
  source 1..20: mol_type = other DNA
gcctcctccctctgactgtc

SEQ ID NO: 2652 - DNA, 20 bp, synthetic construct
  source 1..20: mol_type = other DNA
gacagtcagatggaggaggc

SEQ ID NO: 2653 - DNA, 20 bp, synthetic construct
  source 1..20: mol_type = other DNA
gcctcctccatctgactgtc

SEQ ID NO: 2654 - DNA, 20 bp, synthetic construct
  source 1..20: mol_type = other DNA
gacagtctgagggaggaggc

SEQ ID NO: 2655 - DNA, 20 bp, synthetic construct
  source 1..20: mol_type = other DNA
gcctcctccctcagactgtc

SEQ ID NO: 2656 - DNA, 20 bp, synthetic construct
  source 1..20: mol_type = other DNA
gacagtctgatggaggaggc

SEQ ID NO: 2657 - DNA, 20 bp, synthetic construct
  source 1..20: mol_type = other DNA
gcctcctccatcagactgtc

SEQ ID NO: 2658 - DNA, 20 bp, synthetic construct
  source 1..20: mol_type = other DNA
gccagtcagagggaggaggc

SEQ ID NO: 2659 - DNA, 20 bp, synthetic construct
  source 1..20: mol_type = other DNA
gcctcctccctctgactggc

SEQ ID NO: 2660 - DNA, 20 bp, synthetic construct
  source 1..20: mol_type = other DNA
gccagtcagatggaggaggc

SEQ ID NO: 2661 - DNA, 20 bp, synthetic construct
  source 1..20: mol_type = other DNA
gcctcctccatctgactggc

SEQ ID NO: 2662 - DNA, 20 bp, synthetic construct
  source 1..20: mol_type = other DNA
gccagtctgagggaggaggc

SEQ ID NO: 2663 - DNA, 20 bp, synthetic construct
  source 1..20: mol_type = other DNA
gcctcctccctcagactggc

SEQ ID NO: 2664 - DNA, 20 bp, synthetic construct
  source 1..20: mol_type = other DNA
gccagtctgatggaggaggc

SEQ ID NO: 2665 - DNA, 20 bp, synthetic construct
  source 1..20: mol_type = other DNA
gcctcctccatcagactggc

SEQ ID NO: 2666 - DNA, 20 bp, synthetic construct
  source 1..20: mol_type = other DNA
cacagtcagagggaggaggc

SEQ ID NO: 2667 - DNA, 20 bp, synthetic construct
  source 1..20: mol_type = other DNA
gcctcctccctctgactgtg

SEQ ID NO: 2668 - DNA, 20 bp, synthetic construct
  source 1..20: mol_type = other DNA
cacagtcagatggaggaggc

SEQ ID NO: 2669 - DNA, 20 bp, synthetic construct
  source 1..20: mol_type = other DNA
gcctcctccatctgactgtg

SEQ ID NO: 2670 - DNA, 20 bp, synthetic construct
  source 1..20: mol_type = other DNA
cacagtctgagggaggaggc

SEQ ID NO: 2671 - DNA, 20 bp, synthetic construct
  source 1..20: mol_type = other DNA
gcctcctccctcagactgtg

SEQ ID NO: 2672 - DNA, 20 bp, synthetic construct
  source 1..20: mol_type = other DNA
cacagtctgatggaggaggc

SEQ ID NO: 2673 - DNA, 20 bp, synthetic construct
  source 1..20: mol_type = other DNA
gcctcctccatcagactgtg

SEQ ID NO: 2674 - DNA, 20 bp, synthetic construct
  source 1..20: mol_type = other DNA
cccagtcagagggaggaggc

SEQ ID NO: 2675 - DNA, 20 bp, synthetic construct
  source 1..20: mol_type = other DNA
gcctcctccctctgactggg

SEQ ID NO: 2676 - DNA, 20 bp, synthetic construct
  source 1..20: mol_type = other DNA
cccagtcagatggaggaggc

SEQ ID NO: 2677 - DNA, 20 bp, synthetic construct
  source 1..20: mol_type = other DNA
gcctcctccatctgactggg

SEQ ID NO: 2678 - DNA, 20 bp, synthetic construct
  source 1..20: mol_type = other DNA
cccagtctgagggaggaggc

SEQ ID NO: 2679 - DNA, 20 bp, synthetic construct
  source 1..20: mol_type = other DNA
gcctcctccctcagactggg

SEQ ID NO: 2680 - DNA, 20 bp, synthetic construct
  source 1..20: mol_type = other DNA
cccagtctgatggaggaggc

SEQ ID NO: 2681 - DNA, 20 bp, synthetic construct
  source 1..20: mol_type = other DNA
gcctcctccatcagactggg

SEQ ID NO: 2682-2683 - skipped (2 entries)

SEQ ID NO: 2684 - DNA, 14 bp, synthetic construct
  source 1..14: mol_type = other DNA
tgtttattttggca

SEQ ID NO: 2685 - DNA, 14 bp, synthetic construct
  source 1..14: mol_type = other DNA
tgccaaaataaaca

SEQ ID NO: 2686-2689 - skipped (4 entries)

SEQ ID NO: 2690 - DNA, 10 bp, synthetic construct
  source 1..10: mol_type = other DNA
taatgattaa

SEQ ID NO: 2691 - DNA, 10 bp, synthetic construct
  source 1..10: mol_type = other DNA
ttaatcatta

SEQ ID NO: 2692 - DNA, 10 bp, synthetic construct
  source 1..10: mol_type = other DNA
taatgattat

SEQ ID NO: 2693 - DNA, 10 bp, synthetic construct
  source 1..10: mol_type = other DNA
ataatcatta

SEQ ID NO: 2694 - DNA, 10 bp, synthetic construct
  source 1..10: mol_type = other DNA
taatgattta

SEQ ID NO: 2695 - DNA, 10 bp, synthetic construct
  source 1..10: mol_type = other DNA
taaatcatta

SEQ ID NO: 2696 - DNA, 10 bp, synthetic construct
  source 1..10: mol_type = other DNA
taatgatttt

SEQ ID NO: 2697 - DNA, 10 bp, synthetic construct
  source 1..10: mol_type = other DNA
aaaatcatta

SEQ ID NO: 2698 - DNA, 10 bp, synthetic construct
  source 1..10: mol_type = other DNA
taatggttaa

SEQ ID NO: 2699 - DNA, 10 bp, synthetic construct
  source 1..10: mol_type = other DNA
ttaaccatta

SEQ ID NO: 2700 - DNA, 10 bp, synthetic construct
  source 1..10: mol_type = other DNA
taatggttat

SEQ ID NO: 2701 - DNA, 10 bp, synthetic construct
  source 1..10: mol_type = other DNA
ataaccatta

SEQ ID NO: 2702 - DNA, 10 bp, synthetic construct
  source 1..10: mol_type = other DNA
taatggttta

SEQ ID NO: 2703 - DNA, 10 bp, synthetic construct
  source 1..10: mol_type = other DNA
taaaccatta

SEQ ID NO: 2704 - DNA, 10 bp, synthetic construct
  source 1..10: mol_type = other DNA
taatggtttt

SEQ ID NO: 2705 - DNA, 10 bp, synthetic construct
  source 1..10: mol_type = other DNA
aaaaccatta

SEQ ID NO: 2706 - DNA, 10 bp, synthetic construct
  source 1..10: mol_type = other DNA
taattattaa

SEQ ID NO: 2707 - DNA, 10 bp, synthetic construct
  source 1..10: mol_type = other DNA
ttaataatta

SEQ ID NO: 2708 - DNA, 10 bp, synthetic construct
  source 1..10: mol_type = other DNA
taattattat

SEQ ID NO: 2709 - DNA, 10 bp, synthetic construct
  source 1..10: mol_type = other DNA
ataataatta

SEQ ID NO: 2710 - DNA, 10 bp, synthetic construct
  source 1..10: mol_type = other DNA
taattattta

SEQ ID NO: 2711 - DNA, 10 bp, synthetic construct
  source 1..10: mol_type = other DNA
taaataatta

SEQ ID NO: 2712 - DNA, 10 bp, synthetic construct
  source 1..10: mol_type = other DNA
taattatttt

SEQ ID NO: 2713 - DNA, 10 bp, synthetic construct
  source 1..10: mol_type = other DNA
aaaataatta

SEQ ID NO: 2714 - DNA, 10 bp, synthetic construct
  source 1..10: mol_type = other DNA
taattgttaa

SEQ ID NO: 2715 - DNA, 10 bp, synthetic construct
  source 1..10: mol_type = other DNA
ttaacaatta

SEQ ID NO: 2716 - DNA, 10 bp, synthetic construct
  source 1..10: mol_type = other DNA
taattgttat

SEQ ID NO: 2717 - DNA, 10 bp, synthetic construct
  source 1..10: mol_type = other DNA
ataacaatta

SEQ ID NO: 2718 - DNA, 10 bp, synthetic construct
  source 1..10: mol_type = other DNA
taattgttta

SEQ ID NO: 2719 - DNA, 10 bp, synthetic construct
  source 1..10: mol_type = other DNA
taaacaatta

SEQ ID NO: 2720 - DNA, 10 bp, synthetic construct
  source 1..10: mol_type = other DNA
taattgtttt

SEQ ID NO: 2721 - DNA, 10 bp, synthetic construct
  source 1..10: mol_type = other DNA
aaaacaatta

SEQ ID NO: 2722 - DNA, 10 bp, synthetic construct
  source 1..10: mol_type = other DNA
acatcaaagg

SEQ ID NO: 2723 - DNA, 10 bp, synthetic construct
  source 1..10: mol_type = other DNA
cctttgatgt

SEQ ID NO: 2724-2741 - skipped (18 entries)

SEQ ID NO: 2742 - DNA, 12 bp, synthetic construct
  source 1..12: mol_type = other DNA
gtgggaaagcct

SEQ ID NO: 2743 - DNA, 12 bp, synthetic construct
  source 1..12: mol_type = other DNA
aggctttcccac

SEQ ID NO: 2744 - DNA, 20 bp, synthetic construct
  source 1..20: mol_type = other DNA
ccccgccccctcccccaccc

SEQ ID NO: 2745 - DNA, 20 bp, synthetic construct
  source 1..20: mol_type = other DNA
gggtgggggagggggcgggg

SEQ ID NO: 2746 - DNA, 20 bp, synthetic construct
  source 1..20: mol_type = other DNA
ccccgccccctcccccacct

SEQ ID NO: 2747 - DNA, 20 bp, synthetic construct
  source 1..20: mol_type = other DNA
aggtgggggagggggcgggg

SEQ ID NO: 2748 - DNA, 20 bp, synthetic construct
  source 1..20: mol_type = other DNA
ccccgcctcctcccccaccc

SEQ ID NO: 2749 - DNA, 20 bp, synthetic construct
  source 1..20: mol_type = other DNA
gggtgggggaggaggcgggg

SEQ ID NO: 2750 - DNA, 20 bp, synthetic construct
  source 1..20: mol_type = other DNA
ccccgcctcctcccccacct

SEQ ID NO: 2751 - DNA, 20 bp, synthetic construct
  source 1..20: mol_type = other DNA
aggtgggggaggaggcgggg

SEQ ID NO: 2752 - DNA, 20 bp, synthetic construct
  source 1..20: mol_type = other DNA
ctccgccccctcccccaccc

SEQ ID NO: 2753 - DNA, 20 bp, synthetic construct
  source 1..20: mol_type = other DNA
gggtgggggagggggcggag

SEQ ID NO: 2754 - DNA, 20 bp, synthetic construct
  source 1..20: mol_type = other DNA
ctccgccccctcccccacct

SEQ ID NO: 2755 - DNA, 20 bp, synthetic construct
  source 1..20: mol_type = other DNA
aggtgggggagggggcggag

SEQ ID NO: 2756 - DNA, 20 bp, synthetic construct
  source 1..20: mol_type = other DNA
ctccgcctcctcccccaccc

SEQ ID NO: 2757 - DNA, 20 bp, synthetic construct
  source 1..20: mol_type = other DNA
gggtgggggaggaggcggag

SEQ ID NO: 2758 - DNA, 20 bp, synthetic construct
  source 1..20: mol_type = other DNA
ctccgcctcctcccccacct

SEQ ID NO: 2759 - DNA, 20 bp, synthetic construct
  source 1..20: mol_type = other DNA
aggtgggggaggaggcggag

SEQ ID NO: 2760-2761 - skipped (2 entries)

SEQ ID NO: 2762 - DNA, 10 bp, synthetic construct
  source 1..10: mol_type = other DNA
agctgacaac

SEQ ID NO: 2763 - DNA, 10 bp, synthetic construct
  source 1..10: mol_type = other DNA
gttgtcagct

SEQ ID NO: 2764 - DNA, 10 bp, synthetic construct
  source 1..10: mol_type = other DNA
agctgacaag

SEQ ID NO: 2765 - DNA, 10 bp, synthetic construct
  source 1..10: mol_type = other DNA
cttgtcagct

SEQ ID NO: 2766 - DNA, 10 bp, synthetic construct
  source 1..10: mol_type = other DNA
agctgacaat

SEQ ID NO: 2767 - DNA, 10 bp, synthetic construct
  source 1..10: mol_type = other DNA
attgtcagct

SEQ ID NO: 2768 - DNA, 10 bp, synthetic construct
  source 1..10: mol_type = other DNA
agctgacacc

SEQ ID NO: 2769 - DNA, 10 bp, synthetic construct
  source 1..10: mol_type = other DNA
ggtgtcagct

SEQ ID NO: 2770 - DNA, 10 bp, synthetic construct
  source 1..10: mol_type = other DNA
agctgacacg

SEQ ID NO: 2771 - DNA, 10 bp, synthetic construct
  source 1..10: mol_type = other DNA
cgtgtcagct

SEQ ID NO: 2772 - DNA, 10 bp, synthetic construct
  source 1..10: mol_type = other DNA
agctgacact

SEQ ID NO: 2773 - DNA, 10 bp, synthetic construct
  source 1..10: mol_type = other DNA
agtgtcagct

SEQ ID NO: 2774 - DNA, 10 bp, synthetic construct
  source 1..10: mol_type = other DNA
agctgacagc

SEQ ID NO: 2775 - DNA, 10 bp, synthetic construct
  source 1..10: mol_type = other DNA
gctgtcagct

SEQ ID NO: 2776 - DNA, 10 bp, synthetic construct
  source 1..10: mol_type = other DNA
agctgacagg

SEQ ID NO: 2777 - DNA, 10 bp, synthetic construct
  source 1..10: mol_type = other DNA
cctgtcagct

SEQ ID NO: 2778 - DNA, 10 bp, synthetic construct
  source 1..10: mol_type = other DNA
agctgacagt

SEQ ID NO: 2779 - DNA, 10 bp, synthetic construct
  source 1..10: mol_type = other DNA
actgtcagct

SEQ ID NO: 2780 - DNA, 10 bp, synthetic construct
  source 1..10: mol_type = other DNA
agctgtcaac

SEQ ID NO: 2781 - DNA, 10 bp, synthetic construct
  source 1..10: mol_type = other DNA
gttgacagct

SEQ ID NO: 2782 - DNA, 10 bp, synthetic construct
  source 1..10: mol_type = other DNA
agctgtcaag

SEQ ID NO: 2783 - DNA, 10 bp, synthetic construct
  source 1..10: mol_type = other DNA
cttgacagct

SEQ ID NO: 2784 - DNA, 10 bp, synthetic construct
  source 1..10: mol_type = other DNA
agctgtcaat

SEQ ID NO: 2785 - DNA, 10 bp, synthetic construct
  source 1..10: mol_type = other DNA
attgacagct

SEQ ID NO: 2786 - DNA, 10 bp, synthetic construct
  source 1..10: mol_type = other DNA
agctgtcacc

SEQ ID NO: 2787 - DNA, 10 bp, synthetic construct
  source 1..10: mol_type = other DNA
ggtgacagct

SEQ ID NO: 2788 - DNA, 10 bp, synthetic construct
  source 1..10: mol_type = other DNA
agctgtcacg

SEQ ID NO: 2789 - DNA, 10 bp, synthetic construct
  source 1..10: mol_type = other DNA
cgtgacagct

SEQ ID NO: 2790 - DNA, 10 bp, synthetic construct
  source 1..10: mol_type = other DNA
agctgtcact

SEQ ID NO: 2791 - DNA, 10 bp, synthetic construct
  source 1..10: mol_type = other DNA
agtgacagct

SEQ ID NO: 2792 - DNA, 10 bp, synthetic construct
  source 1..10: mol_type = other DNA
agctgtcagc

SEQ ID NO: 2793 - DNA, 10 bp, synthetic construct
  source 1..10: mol_type = other DNA
gctgacagct

SEQ ID NO: 2794 - DNA, 10 bp, synthetic construct
  source 1..10: mol_type = other DNA
agctgtcagg

SEQ ID NO: 2795 - DNA, 10 bp, synthetic construct
  source 1..10: mol_type = other DNA
cctgacagct

SEQ ID NO: 2796 - DNA, 10 bp, synthetic construct
  source 1..10: mol_type = other DNA
agctgtcagt

SEQ ID NO: 2797 - DNA, 10 bp, synthetic construct
  source 1..10: mol_type = other DNA
actgacagct

SEQ ID NO: 2798 - DNA, 10 bp, synthetic construct
  source 1..10: mol_type = other DNA
cgctgacaac

SEQ ID NO: 2799 - DNA, 10 bp, synthetic construct
  source 1..10: mol_type = other DNA
gttgtcagcg

SEQ ID NO: 2800 - DNA, 10 bp, synthetic construct
  source 1..10: mol_type = other DNA
cgctgacaag

SEQ ID NO: 2801 - DNA, 10 bp, synthetic construct
  source 1..10: mol_type = other DNA
cttgtcagcg

SEQ ID NO: 2802 - DNA, 10 bp, synthetic construct
  source 1..10: mol_type = other DNA
cgctgacaat

SEQ ID NO: 2803 - DNA, 10 bp, synthetic construct
  source 1..10: mol_type = other DNA
attgtcagcg

SEQ ID NO: 2804 - DNA, 10 bp, synthetic construct
  source 1..10: mol_type = other DNA
cgctgacacc

SEQ ID NO: 2805 - DNA, 10 bp, synthetic construct
  source 1..10: mol_type = other DNA
ggtgtcagcg

SEQ ID NO: 2806 - DNA, 10 bp, synthetic construct
  source 1..10: mol_type = other DNA
cgctgacacg

SEQ ID NO: 2807 - DNA, 10 bp, synthetic construct
  source 1..10: mol_type = other DNA
cgtgtcagcg

SEQ ID NO: 2808 - DNA, 10 bp, synthetic construct
  source 1..10: mol_type = other DNA
cgctgacact

SEQ ID NO: 2809 - DNA, 10 bp, synthetic construct
  source 1..10: mol_type = other DNA
agtgtcagcg

SEQ ID NO: 2810 - DNA, 10 bp, synthetic construct
  source 1..10: mol_type = other DNA
cgctgacagc

SEQ ID NO: 2811 - DNA, 10 bp, synthetic construct
  source 1..10: mol_type = other DNA
gctgtcagcg

SEQ ID NO: 2812 - DNA, 10 bp, synthetic construct
  source 1..10: mol_type = other DNA
cgctgacagg

SEQ ID NO: 2813 - DNA, 10 bp, synthetic construct
  source 1..10: mol_type = other DNA
cctgtcagcg

SEQ ID NO: 2814 - DNA, 10 bp, synthetic construct
  source 1..10: mol_type = other DNA
cgctgacagt

SEQ ID NO: 2815 - DNA, 10 bp, synthetic construct
  source 1..10: mol_type = other DNA
actgtcagcg

SEQ ID NO: 2816 - DNA, 10 bp, synthetic construct
  source 1..10: mol_type = other DNA
cgctgtcaac

SEQ ID NO: 2817 - DNA, 10 bp, synthetic construct
  source 1..10: mol_type = other DNA
gttgacagcg

SEQ ID NO: 2818 - DNA, 10 bp, synthetic construct
  source 1..10: mol_type = other DNA
cgctgtcaag

SEQ ID NO: 2819 - DNA, 10 bp, synthetic construct
  source 1..10: mol_type = other DNA
cttgacagcg

SEQ ID NO: 2820 - DNA, 10 bp, synthetic construct
  source 1..10: mol_type = other DNA
cgctgtcaat

SEQ ID NO: 2821 - DNA, 10 bp, synthetic construct
  source 1..10: mol_type = other DNA
attgacagcg

SEQ ID NO: 2822 - DNA, 10 bp, synthetic construct
  source 1..10: mol_type = other DNA
cgctgtcacc

SEQ ID NO: 2823 - DNA, 10 bp, synthetic construct
  source 1..10: mol_type = other DNA
ggtgacagcg

SEQ ID NO: 2824 - DNA, 10 bp, synthetic construct
  source 1..10: mol_type = other DNA
cgctgtcacg

SEQ ID NO: 2825 - DNA, 10 bp, synthetic construct
  source 1..10: mol_type = other DNA
cgtgacagcg

SEQ ID NO: 2826 - DNA, 10 bp, synthetic construct
  source 1..10: mol_type = other DNA
cgctgtcact

SEQ ID NO: 2827 - DNA, 10 bp, synthetic construct
  source 1..10: mol_type = other DNA
agtgacagcg

SEQ ID NO: 2828 - DNA, 10 bp, synthetic construct
  source 1..10: mol_type = other DNA
cgctgtcagc

SEQ ID NO: 2829 - DNA, 10 bp, synthetic construct
  source 1..10: mol_type = other DNA
gctgacagcg

SEQ ID NO: 2830 - DNA, 10 bp, synthetic construct
  source 1..10: mol_type = other DNA
cgctgtcagg

SEQ ID NO: 2831 - DNA, 10 bp, synthetic construct
  source 1..10: mol_type = other DNA
cctgacagcg

SEQ ID NO: 2832 - DNA, 10 bp, synthetic construct
  source 1..10: mol_type = other DNA
cgctgtcagt

SEQ ID NO: 2833 - DNA, 10 bp, synthetic construct
  source 1..10: mol_type = other DNA
actgacagcg

SEQ ID NO: 2834 - DNA, 10 bp, synthetic construct
  source 1..10: mol_type = other DNA
ggctgacaac

SEQ ID NO: 2835 - DNA, 10 bp, synthetic construct
  source 1..10: mol_type = other DNA
gttgtcagcc

SEQ ID NO: 2836 - DNA, 10 bp, synthetic construct
  source 1..10: mol_type = other DNA
ggctgacaag

SEQ ID NO: 2837 - DNA, 10 bp, synthetic construct
  source 1..10: mol_type = other DNA
cttgtcagcc

SEQ ID NO: 2838 - DNA, 10 bp, synthetic construct
  source 1..10: mol_type = other DNA
ggctgacaat

SEQ ID NO: 2839 - DNA, 10 bp, synthetic construct
  source 1..10: mol_type = other DNA
attgtcagcc

SEQ ID NO: 2840 - DNA, 10 bp, synthetic construct
  source 1..10: mol_type = other DNA
ggctgacacc

SEQ ID NO: 2841 - DNA, 10 bp, synthetic construct
  source 1..10: mol_type = other DNA
ggtgtcagcc

SEQ ID NO: 2842 - DNA, 10 bp, synthetic construct
  source 1..10: mol_type = other DNA
ggctgacacg

SEQ ID NO: 2843 - DNA, 10 bp, synthetic construct
  source 1..10: mol_type = other DNA
cgtgtcagcc

SEQ ID NO: 2844 - DNA, 10 bp, synthetic construct
  source 1..10: mol_type = other DNA
ggctgacact

SEQ ID NO: 2845 - DNA, 10 bp, synthetic construct
  source 1..10: mol_type = other DNA
agtgtcagcc

SEQ ID NO: 2846 - DNA, 10 bp, synthetic construct
  source 1..10: mol_type = other DNA
ggctgacagc

SEQ ID NO: 2847 - DNA, 10 bp, synthetic construct
  source 1..10: mol_type = other DNA
gctgtcagcc

SEQ ID NO: 2848 - DNA, 10 bp, synthetic construct
  source 1..10: mol_type = other DNA
ggctgacagg

SEQ ID NO: 2849 - DNA, 10 bp, synthetic construct
  source 1..10: mol_type = other DNA
cctgtcagcc

SEQ ID NO: 2850 - DNA, 10 bp, synthetic construct
  source 1..10: mol_type = other DNA
ggctgacagt

SEQ ID NO: 2851 - DNA, 10 bp, synthetic construct
  source 1..10: mol_type = other DNA
actgtcagcc

SEQ ID NO: 2852 - DNA, 10 bp, synthetic construct
  source 1..10: mol_type = other DNA
ggctgtcaac

SEQ ID NO: 2853 - DNA, 10 bp, synthetic construct
  source 1..10: mol_type = other DNA
gttgacagcc

SEQ ID NO: 2854 - DNA, 10 bp, synthetic construct
  source 1..10: mol_type = other DNA
ggctgtcaag

SEQ ID NO: 2855 - DNA, 10 bp, synthetic construct
  source 1..10: mol_type = other DNA
cttgacagcc

SEQ ID NO: 2856 - DNA, 10 bp, synthetic construct
  source 1..10: mol_type = other DNA
ggctgtcaat

SEQ ID NO: 2857 - DNA, 10 bp, synthetic construct
  source 1..10: mol_type = other DNA
attgacagcc

SEQ ID NO: 2858 - DNA, 10 bp, synthetic construct
  source 1..10: mol_type = other DNA
ggctgtcacc

SEQ ID NO: 2859 - DNA, 10 bp, synthetic construct
  source 1..10: mol_type = other DNA
ggtgacagcc

SEQ ID NO: 2860 - DNA, 10 bp, synthetic construct
  source 1..10: mol_type = other DNA
ggctgtcacg

SEQ ID NO: 2861 - DNA, 10 bp, synthetic construct
  source 1..10: mol_type = other DNA
cgtgacagcc

SEQ ID NO: 2862 - DNA, 10 bp, synthetic construct
  source 1..10: mol_type = other DNA
ggctgtcact

SEQ ID NO: 2863 - DNA, 10 bp, synthetic construct
  source 1..10: mol_type = other DNA
agtgacagcc

SEQ ID NO: 2864 - DNA, 10 bp, synthetic construct
  source 1..10: mol_type = other DNA
ggctgtcagc

SEQ ID NO: 2865 - DNA, 10 bp, synthetic construct
  source 1..10: mol_type = other DNA
gctgacagcc

SEQ ID NO: 2866 - DNA, 10 bp, synthetic construct
  source 1..10: mol_type = other DNA
ggctgtcagg

SEQ ID NO: 2867 - DNA, 10 bp, synthetic construct
  source 1..10: mol_type = other DNA
cctgacagcc

SEQ ID NO: 2868 - DNA, 10 bp, synthetic construct
  source 1..10: mol_type = other DNA
ggctgtcagt

SEQ ID NO: 2869 - DNA, 10 bp, synthetic construct
  source 1..10: mol_type = other DNA
actgacagcc

SEQ ID NO: 2870 - DNA, 12 bp, synthetic construct
  source 1..12: mol_type = other DNA
ggcttccagccc

SEQ ID NO: 2871 - DNA, 12 bp, synthetic construct
  source 1..12: mol_type = other DNA
gggctggaagcc

SEQ ID NO: 2872 - DNA, 12 bp, synthetic construct
  source 1..12: mol_type = other DNA
ggcttccagcct

SEQ ID NO: 2873 - DNA, 12 bp, synthetic construct
  source 1..12: mol_type = other DNA
aggctggaagcc

SEQ ID NO: 2874 - DNA, 12 bp, synthetic construct
  source 1..12: mol_type = other DNA
ggcttctagccc

SEQ ID NO: 2875 - DNA, 12 bp, synthetic construct
  source 1..12: mol_type = other DNA
gggctagaagcc

SEQ ID NO: 2876 - DNA, 12 bp, synthetic construct
  source 1..12: mol_type = other DNA
ggcttctagcct

SEQ ID NO: 2877 - DNA, 12 bp, synthetic construct
  source 1..12: mol_type = other DNA
aggctagaagcc

SEQ ID NO: 2878 - DNA, 12 bp, synthetic construct
  source 1..12: mol_type = other DNA
gctgtacctccc

SEQ ID NO: 2879 - DNA, 12 bp, synthetic construct
  source 1..12: mol_type = other DNA
gggaggtacagc

SEQ ID NO: 2880 - DNA, 12 bp, synthetic construct
  source 1..12: mol_type = other DNA
gctgtacctcct

SEQ ID NO: 2881 - DNA, 12 bp, synthetic construct
  source 1..12: mol_type = other DNA
aggaggtacagc

SEQ ID NO: 2882 - DNA, 14 bp, synthetic construct
  source 1..14: mol_type = other DNA
tcagtttcactttc

SEQ ID NO: 2883 - DNA, 14 bp, synthetic construct
  source 1..14: mol_type = other DNA
gaaagtgaaactga

SEQ ID NO: 2884 - DNA, 14 bp, synthetic construct
  source 1..14: mol_type = other DNA
tcagtttcgctttc

SEQ ID NO: 2885 - DNA, 14 bp, synthetic construct
  source 1..14: mol_type = other DNA
gaaagcgaaactga

SEQ ID NO: 2886 - DNA, 15 bp, synthetic construct
  source 1..15: mol_type = other DNA
ctggctccatgccaa

SEQ ID NO: 2887 - DNA, 15 bp, synthetic construct
  source 1..15: mol_type = other DNA
ttggcatggagccag

SEQ ID NO: 2888 - DNA, 15 bp, synthetic construct
  source 1..15: mol_type = other DNA
ttggctccatgccaa

SEQ ID NO: 2889 - DNA, 15 bp, synthetic construct
  source 1..15: mol_type = other DNA
ttggcatggagccaa

SEQ ID NO: 2890-2893 - skipped (4 entries)

SEQ ID NO: 2894 - DNA, 18 bp, synthetic construct
  source 1..18: mol_type = other DNA
ggaaagcgaaagctaacc

SEQ ID NO: 2895 - DNA, 18 bp, synthetic construct
  source 1..18: mol_type = other DNA
ggttagctttcgctttcc

SEQ ID NO: 2896 - DNA, 18 bp, synthetic construct
  source 1..18: mol_type = other DNA
ggaaagcgaaagctatcc

SEQ ID NO: 2897 - DNA, 18 bp, synthetic construct
  source 1..18: mol_type = other DNA
ggatagctttcgctttcc

SEQ ID NO: 2898 - DNA, 18 bp, synthetic construct
  source 1..18: mol_type = other DNA
ggaaagcgaaagcttacc

SEQ ID NO: 2899 - DNA, 18 bp, synthetic construct
  source 1..18: mol_type = other DNA
ggtaagctttcgctttcc

SEQ ID NO: 2900 - DNA, 18 bp, synthetic construct
  source 1..18: mol_type = other DNA
ggaaagcgaaagctttcc

SEQ ID NO: 2901 - DNA, 18 bp, synthetic construct
  source 1..18: mol_type = other DNA
ggaaagctttcgctttcc

SEQ ID NO: 2902 - DNA, 18 bp, synthetic construct
  source 1..18: mol_type = other DNA
ggaaagcgaaacctaacc

SEQ ID NO: 2903 - DNA, 18 bp, synthetic construct
  source 1..18: mol_type = other DNA
ggttaggtttcgctttcc

SEQ ID NO: 2904 - DNA, 18 bp, synthetic construct
  source 1..18: mol_type = other DNA
ggaaagcgaaacctatcc

SEQ ID NO: 2905 - DNA, 18 bp, synthetic construct
  source 1..18: mol_type = other DNA
ggataggtttcgctttcc

SEQ ID NO: 2906 - DNA, 18 bp, synthetic construct
  source 1..18: mol_type = other DNA
ggaaagcgaaaccttacc

SEQ ID NO: 2907 - DNA, 18 bp, synthetic construct
  source 1..18: mol_type = other DNA
ggtaaggtttcgctttcc

SEQ ID NO: 2908 - DNA, 18 bp, synthetic construct
  source 1..18: mol_type = other DNA
ggaaagcgaaacctttcc

SEQ ID NO: 2909 - DNA, 18 bp, synthetic construct
  source 1..18: mol_type = other DNA
ggaaaggtttcgctttcc

SEQ ID NO: 2910 - DNA, 18 bp, synthetic construct
  source 1..18: mol_type = other DNA
ggaaagtgaaagctaacc

SEQ ID NO: 2911 - DNA, 18 bp, synthetic construct
  source 1..18: mol_type = other DNA
ggttagctttcactttcc

SEQ ID NO: 2912 - DNA, 18 bp, synthetic construct
  source 1..18: mol_type = other DNA
ggaaagtgaaagctatcc

SEQ ID NO: 2913 - DNA, 18 bp, synthetic construct
  source 1..18: mol_type = other DNA
ggatagctttcactttcc

SEQ ID NO: 2914 - DNA, 18 bp, synthetic construct
  source 1..18: mol_type = other DNA
ggaaagtgaaagcttacc

SEQ ID NO: 2915 - DNA, 18 bp, synthetic construct
  source 1..18: mol_type = other DNA
ggtaagctttcactttcc

SEQ ID NO: 2916 - DNA, 18 bp, synthetic construct
  source 1..18: mol_type = other DNA
ggaaagtgaaagctttcc

SEQ ID NO: 2917 - DNA, 18 bp, synthetic construct
  source 1..18: mol_type = other DNA
ggaaagctttcactttcc

SEQ ID NO: 2918 - DNA, 18 bp, synthetic construct
  source 1..18: mol_type = other DNA
ggaaagtgaaacctaacc

SEQ ID NO: 2919 - DNA, 18 bp, synthetic construct
  source 1..18: mol_type = other DNA
ggttaggtttcactttcc

SEQ ID NO: 2920 - DNA, 18 bp, synthetic construct
  source 1..18: mol_type = other DNA
ggaaagtgaaacctatcc

SEQ ID NO: 2921 - DNA, 18 bp, synthetic construct
  source 1..18: mol_type = other DNA
ggataggtttcactttcc

SEQ ID NO: 2922 - DNA, 18 bp, synthetic construct
  source 1..18: mol_type = other DNA
ggaaagtgaaaccttacc

SEQ ID NO: 2923 - DNA, 18 bp, synthetic construct
  source 1..18: mol_type = other DNA
ggtaaggtttcactttcc

SEQ ID NO: 2924 - DNA, 18 bp, synthetic construct
  source 1..18: mol_type = other DNA
ggaaagtgaaacctttcc

SEQ ID NO: 2925 - DNA, 18 bp, synthetic construct
  source 1..18: mol_type = other DNA
ggaaaggtttcactttcc

SEQ ID NO: 2926 - DNA, 18 bp, synthetic construct
  source 1..18: mol_type = other DNA
cgaaagcgaaagctaacc

SEQ ID NO: 2927 - DNA, 18 bp, synthetic construct
  source 1..18: mol_type = other DNA
ggttagctttcgctttcg

SEQ ID NO: 2928 - DNA, 18 bp, synthetic construct
  source 1..18: mol_type = other DNA
cgaaagcgaaagctatcc

SEQ ID NO: 2929 - DNA, 18 bp, synthetic construct
  source 1..18: mol_type = other DNA
ggatagctttcgctttcg

SEQ ID NO: 2930 - DNA, 18 bp, synthetic construct
  source 1..18: mol_type = other DNA
cgaaagcgaaagcttacc

SEQ ID NO: 2931 - DNA, 18 bp, synthetic construct
  source 1..18: mol_type = other DNA
ggtaagctttcgctttcg

SEQ ID NO: 2932 - DNA, 18 bp, synthetic construct
  source 1..18: mol_type = other DNA
cgaaagcgaaagctttcc

SEQ ID NO: 2933 - DNA, 18 bp, synthetic construct
  source 1..18: mol_type = other DNA
ggaaagctttcgctttcg

SEQ ID NO: 2934 - DNA, 18 bp, synthetic construct
  source 1..18: mol_type = other DNA
cgaaagcgaaacctaacc

SEQ ID NO: 2935 - DNA, 18 bp, synthetic construct
  source 1..18: mol_type = other DNA
ggttaggtttcgctttcg

SEQ ID NO: 2936 - DNA, 18 bp, synthetic construct
  source 1..18: mol_type = other DNA
cgaaagcgaaacctatcc

SEQ ID NO: 2937 - DNA, 18 bp, synthetic construct
  source 1..18: mol_type = other DNA
ggataggtttcgctttcg

SEQ ID NO: 2938 - DNA, 18 bp, synthetic construct
  source 1..18: mol_type = other DNA
cgaaagcgaaaccttacc

SEQ ID NO: 2939 - DNA, 18 bp, synthetic construct
  source 1..18: mol_type = other DNA
ggtaaggtttcgctttcg

SEQ ID NO: 2940 - DNA, 18 bp, synthetic construct
  source 1..18: mol_type = other DNA
cgaaagcgaaacctttcc

SEQ ID NO: 2941 - DNA, 18 bp, synthetic construct
  source 1..18: mol_type = other DNA
ggaaaggtttcgctttcg

SEQ ID NO: 2942 - DNA, 18 bp, synthetic construct
  source 1..18: mol_type = other DNA
cgaaagtgaaagctaacc

SEQ ID NO: 2943 - DNA, 18 bp, synthetic construct
  source 1..18: mol_type = other DNA
ggttagctttcactttcg

SEQ ID NO: 2944 - DNA, 18 bp, synthetic construct
  source 1..18: mol_type = other DNA
cgaaagtgaaagctatcc

SEQ ID NO: 2945 - DNA, 18 bp, synthetic construct
  source 1..18: mol_type = other DNA
ggatagctttcactttcg

SEQ ID NO: 2946 - DNA, 18 bp, synthetic construct
  source 1..18: mol_type = other DNA
cgaaagtgaaagcttacc

SEQ ID NO: 2947 - DNA, 18 bp, synthetic construct
  source 1..18: mol_type = other DNA
ggtaagctttcactttcg

SEQ ID NO: 2948 - DNA, 18 bp, synthetic construct
  source 1..18: mol_type = other DNA
cgaaagtgaaagctttcc

SEQ ID NO: 2949 - DNA, 18 bp, synthetic construct
  source 1..18: mol_type = other DNA
ggaaagctttcactttcg

SEQ ID NO: 2950 - DNA, 18 bp, synthetic construct
  source 1..18: mol_type = other DNA
cgaaagtgaaacctaacc

SEQ ID NO: 2951 - DNA, 18 bp, synthetic construct
  source 1..18: mol_type = other DNA
ggttaggtttcactttcg

SEQ ID NO: 2952 - DNA, 18 bp, synthetic construct
  source 1..18: mol_type = other DNA
cgaaagtgaaacctatcc

SEQ ID NO: 2953 - DNA, 18 bp, synthetic construct
  source 1..18: mol_type = other DNA
ggataggtttcactttcg

SEQ ID NO: 2954 - DNA, 18 bp, synthetic construct
  source 1..18: mol_type = other DNA
cgaaagtgaaaccttacc

SEQ ID NO: 2955 - DNA, 18 bp, synthetic construct
  source 1..18: mol_type = other DNA
ggtaaggtttcactttcg

SEQ ID NO: 2956 - DNA, 18 bp, synthetic construct
  source 1..18: mol_type = other DNA
cgaaagtgaaacctttcc

SEQ ID NO: 2957 - DNA, 18 bp, synthetic construct
  source 1..18: mol_type = other DNA
ggaaaggtttcactttcg

SEQ ID NO: 2958 - DNA, 14 bp, synthetic construct
  source 1..14: mol_type = other DNA
ctgcctccctccct

SEQ ID NO: 2959 - DNA, 14 bp, synthetic construct
  source 1..14: mol_type = other DNA
agggagggaggcag

SEQ ID NO: 2960 - DNA, 14 bp, synthetic construct
  source 1..14: mol_type = other DNA
ctgcttccctccct

SEQ ID NO: 2961 - DNA, 14 bp, synthetic construct
  source 1..14: mol_type = other DNA
agggagggaagcag

SEQ ID NO: 2962 - DNA, 14 bp, synthetic construct
  source 1..14: mol_type = other DNA
ctgtctccctccct

SEQ ID NO: 2963 - DNA, 14 bp, synthetic construct
  source 1..14: mol_type = other DNA
agggagggagacag

SEQ ID NO: 2964 - DNA, 14 bp, synthetic construct
  source 1..14: mol_type = other DNA
ctgtttccctccct

SEQ ID NO: 2965 - DNA, 14 bp, synthetic construct
  source 1..14: mol_type = other DNA
agggagggaaacag

SEQ ID NO: 2966 - DNA, 14 bp, synthetic construct
  source 1..14: mol_type = other DNA
ctccctccctccct

SEQ ID NO: 2967 - DNA, 14 bp, synthetic construct
  source 1..14: mol_type = other DNA
agggagggagggag

SEQ ID NO: 2968 - DNA, 14 bp, synthetic construct
  source 1..14: mol_type = other DNA
ctccttccctccct

SEQ ID NO: 2969 - DNA, 14 bp, synthetic construct
  source 1..14: mol_type = other DNA
agggagggaaggag

SEQ ID NO: 2970 - DNA, 14 bp, synthetic construct
  source 1..14: mol_type = other DNA
ctctctccctccct

SEQ ID NO: 2971 - DNA, 14 bp, synthetic construct
  source 1..14: mol_type = other DNA
agggagggagagag

SEQ ID NO: 2972 - DNA, 14 bp, synthetic construct
  source 1..14: mol_type = other DNA
ctctttccctccct

SEQ ID NO: 2973 - DNA, 14 bp, synthetic construct
  source 1..14: mol_type = other DNA
agggagggaaagag

SEQ ID NO: 2974 - DNA, 12 bp, synthetic construct
  source 1..12: mol_type = other DNA
aaatgacgtcat

SEQ ID NO: 2975 - DNA, 12 bp, synthetic construct
  source 1..12: mol_type = other DNA
atgacgtcattt

SEQ ID NO: 2976 - DNA, 12 bp, synthetic construct
  source 1..12: mol_type = other DNA
acatgacgtcat

SEQ ID NO: 2977 - DNA, 12 bp, synthetic construct
  source 1..12: mol_type = other DNA
atgacgtcatgt

SEQ ID NO: 2978 - DNA, 12 bp, synthetic construct
  source 1..12: mol_type = other DNA
agatgacgtcat

SEQ ID NO: 2979 - DNA, 12 bp, synthetic construct
  source 1..12: mol_type = other DNA
atgacgtcatct

SEQ ID NO: 2980 - DNA, 12 bp, synthetic construct
  source 1..12: mol_type = other DNA
caatgacgtcat

SEQ ID NO: 2981 - DNA, 12 bp, synthetic construct
  source 1..12: mol_type = other DNA
atgacgtcattg

SEQ ID NO: 2982 - DNA, 12 bp, synthetic construct
  source 1..12: mol_type = other DNA
ccatgacgtcat

SEQ ID NO: 2983 - DNA, 12 bp, synthetic construct
  source 1..12: mol_type = other DNA
atgacgtcatgg

SEQ ID NO: 2984 - DNA, 12 bp, synthetic construct
  source 1..12: mol_type = other DNA
cgatgacgtcat

SEQ ID NO: 2985 - DNA, 12 bp, synthetic construct
  source 1..12: mol_type = other DNA
atgacgtcatcg

SEQ ID NO: 2986 - DNA, 12 bp, synthetic construct
  source 1..12: mol_type = other DNA
gaatgacgtcat

SEQ ID NO: 2987 - DNA, 12 bp, synthetic construct
  source 1..12: mol_type = other DNA
atgacgtcattc

SEQ ID NO: 2988 - DNA, 12 bp, synthetic construct
  source 1..12: mol_type = other DNA
gcatgacgtcat

SEQ ID NO: 2989 - DNA, 12 bp, synthetic construct
  source 1..12: mol_type = other DNA
atgacgtcatgc

SEQ ID NO: 2990 - DNA, 12 bp, synthetic construct
  source 1..12: mol_type = other DNA
ggatgacgtcat

SEQ ID NO: 2991 - DNA, 12 bp, synthetic construct
  source 1..12: mol_type = other DNA
atgacgtcatcc

SEQ ID NO: 2992 - DNA, 17 bp, synthetic construct
  source 1..17: mol_type = other DNA
taattgttatttaatag

SEQ ID NO: 2993 - DNA, 17 bp, synthetic construct
  source 1..17: mol_type = other DNA
ctattaaataacaatta

SEQ ID NO: 2994 - DNA, 17 bp, synthetic construct
  source 1..17: mol_type = other DNA
taattgttttttaatag

SEQ ID NO: 2995 - DNA, 17 bp, synthetic construct
  source 1..17: mol_type = other DNA
ctattaaaaaacaatta

SEQ ID NO: 2996 - DNA, 15 bp, synthetic construct
  source 1..15: mol_type = other DNA
aaggcagcagcatct

SEQ ID NO: 2997 - DNA, 15 bp, synthetic construct
  source 1..15: mol_type = other DNA
agatgctgctgcctt

SEQ ID NO: 2998 - DNA, 15 bp, synthetic construct
  source 1..15: mol_type = other DNA
aaggcagtagcatct

SEQ ID NO: 2999 - DNA, 15 bp, synthetic construct
  source 1..15: mol_type = other DNA
agatgctactgcctt

SEQ ID NO: 3000 - DNA, 15 bp, synthetic construct
  source 1..15: mol_type = other DNA
aaggtagcagcatct

SEQ ID NO: 3001 - DNA, 15 bp, synthetic construct
  source 1..15: mol_type = other DNA
agatgctgctacctt

SEQ ID NO: 3002 - DNA, 15 bp, synthetic construct
  source 1..15: mol_type = other DNA
aaggtagtagcatct

SEQ ID NO: 3003 - DNA, 15 bp, synthetic construct
  source 1..15: mol_type = other DNA
agatgctactacctt

SEQ ID NO: 3004 - DNA, 15 bp, synthetic construct
  source 1..15: mol_type = other DNA
agggcagcagcatct

SEQ ID NO: 3005 - DNA, 15 bp, synthetic construct
  source 1..15: mol_type = other DNA
agatgctgctgccct

SEQ ID NO: 3006 - DNA, 15 bp, synthetic construct
  source 1..15: mol_type = other DNA
agggcagtagcatct

SEQ ID NO: 3007 - DNA, 15 bp, synthetic construct
  source 1..15: mol_type = other DNA
agatgctactgccct

SEQ ID NO: 3008 - DNA, 15 bp, synthetic construct
  source 1..15: mol_type = other DNA
agggtagcagcatct

SEQ ID NO: 3009 - DNA, 15 bp, synthetic construct
  source 1..15: mol_type = other DNA
agatgctgctaccct

SEQ ID NO: 3010 - DNA, 15 bp, synthetic construct
  source 1..15: mol_type = other DNA
agggtagtagcatct

SEQ ID NO: 3011 - DNA, 15 bp, synthetic construct
  source 1..15: mol_type = other DNA
agatgctactaccct

SEQ ID NO: 3012 - DNA, 15 bp, synthetic construct
  source 1..15: mol_type = other DNA
atggcagcagcatct

SEQ ID NO: 3013 - DNA, 15 bp, synthetic construct
  source 1..15: mol_type = other DNA
agatgctgctgccat

SEQ ID NO: 3014 - DNA, 15 bp, synthetic construct
  source 1..15: mol_type = other DNA
atggcagtagcatct

SEQ ID NO: 3015 - DNA, 15 bp, synthetic construct
  source 1..15: mol_type = other DNA
agatgctactgccat

SEQ ID NO: 3016 - DNA, 15 bp, synthetic construct
  source 1..15: mol_type = other DNA
atggtagcagcatct

SEQ ID NO: 3017 - DNA, 15 bp, synthetic construct
  source 1..15: mol_type = other DNA
agatgctgctaccat

SEQ ID NO: 3018 - DNA, 15 bp, synthetic construct
  source 1..15: mol_type = other DNA
atggtagtagcatct

SEQ ID NO: 3019 - DNA, 15 bp, synthetic construct
  source 1..15: mol_type = other DNA
agatgctactaccat

SEQ ID NO: 3020 - DNA, 18 bp, synthetic construct
  source 1..18: mol_type = other DNA
cttatctgccagtcgcag

SEQ ID NO: 3021 - DNA, 18 bp, synthetic construct
  source 1..18: mol_type = other DNA
ctgcgactggcagataag

SEQ ID NO: 3022 - DNA, 18 bp, synthetic construct
  source 1..18: mol_type = other DNA
cttatctgccagtcccag

SEQ ID NO: 3023 - DNA, 18 bp, synthetic construct
  source 1..18: mol_type = other DNA
ctgggactggcagataag

SEQ ID NO: 3024 - DNA, 18 bp, synthetic construct
  source 1..18: mol_type = other DNA
cttatctcccagtcgcag

SEQ ID NO: 3025 - DNA, 18 bp, synthetic construct
  source 1..18: mol_type = other DNA
ctgcgactgggagataag

SEQ ID NO: 3026 - DNA, 18 bp, synthetic construct
  source 1..18: mol_type = other DNA
cttatctcccagtcccag

SEQ ID NO: 3027 - DNA, 18 bp, synthetic construct
  source 1..18: mol_type = other DNA
ctgggactgggagataag

SEQ ID NO: 3028 - DNA, 18 bp, synthetic construct
  source 1..18: mol_type = other DNA
aaagagaaagtgaaagta

SEQ ID NO: 3029 - DNA, 18 bp, synthetic construct
  source 1..18: mol_type = other DNA
tactttcactttctcttt

SEQ ID NO: 3030 - DNA, 18 bp, synthetic construct
  source 1..18: mol_type = other DNA
aaagagaaagtgaaagtg

SEQ ID NO: 3031 - DNA, 18 bp, synthetic construct
  source 1..18: mol_type = other DNA
cactttcactttctcttt

SEQ ID NO: 3032 - DNA, 18 bp, synthetic construct
  source 1..18: mol_type = other DNA
aaagagaaagtgaaacta

SEQ ID NO: 3033 - DNA, 18 bp, synthetic construct
  source 1..18: mol_type = other DNA
tagtttcactttctcttt

SEQ ID NO: 3034 - DNA, 18 bp, synthetic construct
  source 1..18: mol_type = other DNA
aaagagaaagtgaaactg

SEQ ID NO: 3035 - DNA, 18 bp, synthetic construct
  source 1..18: mol_type = other DNA
cagtttcactttctcttt

SEQ ID NO: 3036 - DNA, 10 bp, synthetic construct
  source 1..10: mol_type = other DNA
ggtcacgtga

SEQ ID NO: 3037 - DNA, 10 bp, synthetic construct
  source 1..10: mol_type = other DNA
tcacgtgacc

SEQ ID NO: 3038 - DNA, 13 bp, synthetic construct
  source 1..13: mol_type = other DNA
aggtcagtgacct

SEQ ID NO: 3039 - DNA, 13 bp, synthetic construct
  source 1..13: mol_type = other DNA
aggtcactgacct

SEQ ID NO: 3040 - DNA, 10 bp, synthetic construct
  source 1..10: mol_type = other DNA
tttccggtaa

SEQ ID NO: 3041 - DNA, 10 bp, synthetic construct
  source 1..10: mol_type = other DNA
ttaccggaaa

SEQ ID NO: 3042 - DNA, 20 bp, synthetic construct
  source 1..20: mol_type = other DNA
cccccgccccagtcgagccc

SEQ ID NO: 3043 - DNA, 20 bp, synthetic construct
  source 1..20: mol_type = other DNA
gggctcgactggggcggggg

SEQ ID NO: 3044 - DNA, 20 bp, synthetic construct
  source 1..20: mol_type = other DNA
cccccgccccagtcgagcct

SEQ ID NO: 3045 - DNA, 20 bp, synthetic construct
  source 1..20: mol_type = other DNA
aggctcgactggggcggggg

SEQ ID NO: 3046 - DNA, 20 bp, synthetic construct
  source 1..20: mol_type = other DNA
cccccgccccagtcgggccc

SEQ ID NO: 3047 - DNA, 20 bp, synthetic construct
  source 1..20: mol_type = other DNA
gggcccgactggggcggggg

SEQ ID NO: 3048 - DNA, 20 bp, synthetic construct
  source 1..20: mol_type = other DNA
cccccgccccagtcgggcct

SEQ ID NO: 3049 - DNA, 20 bp, synthetic construct
  source 1..20: mol_type = other DNA
aggcccgactggggcggggg

SEQ ID NO: 3050 - DNA, 20 bp, synthetic construct
  source 1..20: mol_type = other DNA
cccccgccccagtccagccc

SEQ ID NO: 3051 - DNA, 20 bp, synthetic construct
  source 1..20: mol_type = other DNA
gggctggactggggcggggg

SEQ ID NO: 3052 - DNA, 20 bp, synthetic construct
  source 1..20: mol_type = other DNA
cccccgccccagtccagcct

SEQ ID NO: 3053 - DNA, 20 bp, synthetic construct
  source 1..20: mol_type = other DNA
aggctggactggggcggggg

SEQ ID NO: 3054 - DNA, 20 bp, synthetic construct
  source 1..20: mol_type = other DNA
cccccgccccagtccggccc

SEQ ID NO: 3055 - DNA, 20 bp, synthetic construct
  source 1..20: mol_type = other DNA
gggccggactggggcggggg

SEQ ID NO: 3056 - DNA, 20 bp, synthetic construct
  source 1..20: mol_type = other DNA
cccccgccccagtccggcct

SEQ ID NO: 3057 - DNA, 20 bp, synthetic construct
  source 1..20: mol_type = other DNA
aggccggactggggcggggg

SEQ ID NO: 3058 - DNA, 20 bp, synthetic construct
  source 1..20: mol_type = other DNA
cccccgccccactcgagccc

SEQ ID NO: 3059 - DNA, 20 bp, synthetic construct
  source 1..20: mol_type = other DNA
gggctcgagtggggcggggg

SEQ ID NO: 3060 - DNA, 20 bp, synthetic construct
  source 1..20: mol_type = other DNA
cccccgccccactcgagcct

SEQ ID NO: 3061 - DNA, 20 bp, synthetic construct
  source 1..20: mol_type = other DNA
aggctcgagtggggcggggg

SEQ ID NO: 3062 - DNA, 20 bp, synthetic construct
  source 1..20: mol_type = other DNA
cccccgccccactcgggccc

SEQ ID NO: 3063 - DNA, 20 bp, synthetic construct
  source 1..20: mol_type = other DNA
gggcccgagtggggcggggg

SEQ ID NO: 3064 - DNA, 20 bp, synthetic construct
  source 1..20: mol_type = other DNA
cccccgccccactcgggcct

SEQ ID NO: 3065 - DNA, 20 bp, synthetic construct
  source 1..20: mol_type = other DNA
aggcccgagtggggcggggg

SEQ ID NO: 3066 - DNA, 20 bp, synthetic construct
  source 1..20: mol_type = other DNA
cccccgccccactccagccc

SEQ ID NO: 3067 - DNA, 20 bp, synthetic construct
  source 1..20: mol_type = other DNA
gggctggagtggggcggggg

SEQ ID NO: 3068 - DNA, 20 bp, synthetic construct
  source 1..20: mol_type = other DNA
cccccgccccactccagcct

SEQ ID NO: 3069 - DNA, 20 bp, synthetic construct
  source 1..20: mol_type = other DNA
aggctggagtggggcggggg

SEQ ID NO: 3070 - DNA, 20 bp, synthetic construct
  source 1..20: mol_type = other DNA
cccccgccccactccggccc

SEQ ID NO: 3071 - DNA, 20 bp, synthetic construct
  source 1..20: mol_type = other DNA
gggccggagtggggcggggg

SEQ ID NO: 3072 - DNA, 20 bp, synthetic construct
  source 1..20: mol_type = other DNA
cccccgccccactccggcct

SEQ ID NO: 3073 - DNA, 20 bp, synthetic construct
  source 1..20: mol_type = other DNA
aggccggagtggggcggggg

SEQ ID NO: 3074 - DNA, 20 bp, synthetic construct
  source 1..20: mol_type = other DNA
cccccgccccggtcgagccc

SEQ ID NO: 3075 - DNA, 20 bp, synthetic construct
  source 1..20: mol_type = other DNA
gggctcgaccggggcggggg

SEQ ID NO: 3076 - DNA, 20 bp, synthetic construct
  source 1..20: mol_type = other DNA
cccccgccccggtcgagcct

SEQ ID NO: 3077 - DNA, 20 bp, synthetic construct
  source 1..20: mol_type = other DNA
aggctcgaccggggcggggg

SEQ ID NO: 3078 - DNA, 20 bp, synthetic construct
  source 1..20: mol_type = other DNA
cccccgccccggtcgggccc

SEQ ID NO: 3079 - DNA, 20 bp, synthetic construct
  source 1..20: mol_type = other DNA
gggcccgaccggggcggggg

SEQ ID NO: 3080 - DNA, 20 bp, synthetic construct
  source 1..20: mol_type = other DNA
cccccgccccggtcgggcct

SEQ ID NO: 3081 - DNA, 20 bp, synthetic construct
  source 1..20: mol_type = other DNA
aggcccgaccggggcggggg

SEQ ID NO: 3082 - DNA, 20 bp, synthetic construct
  source 1..20: mol_type = other DNA
cccccgccccggtccagccc

SEQ ID NO: 3083 - DNA, 20 bp, synthetic construct
  source 1..20: mol_type = other DNA
gggctggaccggggcggggg

SEQ ID NO: 3084 - DNA, 20 bp, synthetic construct
  source 1..20: mol_type = other DNA
cccccgccccggtccagcct

SEQ ID NO: 3085 - DNA, 20 bp, synthetic construct
  source 1..20: mol_type = other DNA
aggctggaccggggcggggg

SEQ ID NO: 3086 - DNA, 20 bp, synthetic construct
  source 1..20: mol_type = other DNA
cccccgccccggtccggccc

SEQ ID NO: 3087 - DNA, 20 bp, synthetic construct
  source 1..20: mol_type = other DNA
gggccggaccggggcggggg

SEQ ID NO: 3088 - DNA, 20 bp, synthetic construct
  source 1..20: mol_type = other DNA
cccccgccccggtccggcct

SEQ ID NO: 3089 - DNA, 20 bp, synthetic construct
  source 1..20: mol_type = other DNA
aggccggaccggggcggggg

SEQ ID NO: 3090 - DNA, 20 bp, synthetic construct
  source 1..20: mol_type = other DNA
cccccgccccgctcgagccc

SEQ ID NO: 3091 - DNA, 20 bp, synthetic construct
  source 1..20: mol_type = other DNA
gggctcgagcggggcggggg

SEQ ID NO: 3092 - DNA, 20 bp, synthetic construct
  source 1..20: mol_type = other DNA
cccccgccccgctcgagcct

SEQ ID NO: 3093 - DNA, 20 bp, synthetic construct
  source 1..20: mol_type = other DNA
aggctcgagcggggcggggg

SEQ ID NO: 3094 - DNA, 20 bp, synthetic construct
  source 1..20: mol_type = other DNA
cccccgccccgctcgggccc

SEQ ID NO: 3095 - DNA, 20 bp, synthetic construct
  source 1..20: mol_type = other DNA
gggcccgagcggggcggggg

SEQ ID NO: 3096 - DNA, 20 bp, synthetic construct
  source 1..20: mol_type = other DNA
cccccgccccgctcgggcct

SEQ ID NO: 3097 - DNA, 20 bp, synthetic construct
  source 1..20: mol_type = other DNA
aggcccgagcggggcggggg

SEQ ID NO: 3098 - DNA, 20 bp, synthetic construct
  source 1..20: mol_type = other DNA
cccccgccccgctccagccc

SEQ ID NO: 3099 - DNA, 20 bp, synthetic construct
  source 1..20: mol_type = other DNA
gggctggagcggggcggggg

SEQ ID NO: 3100 - DNA, 20 bp, synthetic construct
  source 1..20: mol_type = other DNA
cccccgccccgctccagcct

SEQ ID NO: 3101 - DNA, 20 bp, synthetic construct
  source 1..20: mol_type = other DNA
aggctggagcggggcggggg

SEQ ID NO: 3102 - DNA, 20 bp, synthetic construct
  source 1..20: mol_type = other DNA
cccccgccccgctccggccc

SEQ ID NO: 3103 - DNA, 20 bp, synthetic construct
  source 1..20: mol_type = other DNA
gggccggagcggggcggggg

SEQ ID NO: 3104 - DNA, 20 bp, synthetic construct
  source 1..20: mol_type = other DNA
cccccgccccgctccggcct

SEQ ID NO: 3105 - DNA, 20 bp, synthetic construct
  source 1..20: mol_type = other DNA
aggccggagcggggcggggg

SEQ ID NO: 3106 - DNA, 20 bp, synthetic construct
  source 1..20: mol_type = other DNA
ccccctccccagtcgagccc

SEQ ID NO: 3107 - DNA, 20 bp, synthetic construct
  source 1..20: mol_type = other DNA
gggctcgactggggaggggg

SEQ ID NO: 3108 - DNA, 20 bp, synthetic construct
  source 1..20: mol_type = other DNA
ccccctccccagtcgagcct

SEQ ID NO: 3109 - DNA, 20 bp, synthetic construct
  source 1..20: mol_type = other DNA
aggctcgactggggaggggg

SEQ ID NO: 3110 - DNA, 20 bp, synthetic construct
  source 1..20: mol_type = other DNA
ccccctccccagtcgggccc

SEQ ID NO: 3111 - DNA, 20 bp, synthetic construct
  source 1..20: mol_type = other DNA
gggcccgactggggaggggg

SEQ ID NO: 3112 - DNA, 20 bp, synthetic construct
  source 1..20: mol_type = other DNA
ccccctccccagtcgggcct

SEQ ID NO: 3113 - DNA, 20 bp, synthetic construct
  source 1..20: mol_type = other DNA
aggcccgactggggaggggg

SEQ ID NO: 3114 - DNA, 20 bp, synthetic construct
  source 1..20: mol_type = other DNA
ccccctccccagtccagccc

SEQ ID NO: 3115 - DNA, 20 bp, synthetic construct
  source 1..20: mol_type = other DNA
gggctggactggggaggggg

SEQ ID NO: 3116 - DNA, 20 bp, synthetic construct
  source 1..20: mol_type = other DNA
ccccctccccagtccagcct

SEQ ID NO: 3117 - DNA, 20 bp, synthetic construct
  source 1..20: mol_type = other DNA
aggctggactggggaggggg

SEQ ID NO: 3118 - DNA, 20 bp, synthetic construct
  source 1..20: mol_type = other DNA
ccccctccccagtccggccc

SEQ ID NO: 3119 - DNA, 20 bp, synthetic construct
  source 1..20: mol_type = other DNA
gggccggactggggaggggg

SEQ ID NO: 3120 - DNA, 20 bp, synthetic construct
  source 1..20: mol_type = other DNA
ccccctccccagtccggcct

SEQ ID NO: 3121 - DNA, 20 bp, synthetic construct
  source 1..20: mol_type = other DNA
aggccggactggggaggggg

SEQ ID NO: 3122 - DNA, 20 bp, synthetic construct
  source 1..20: mol_type = other DNA
ccccctccccactcgagccc

SEQ ID NO: 3123 - DNA, 20 bp, synthetic construct
  source 1..20: mol_type = other DNA
gggctcgagtggggaggggg

SEQ ID NO: 3124 - DNA, 20 bp, synthetic construct
  source 1..20: mol_type = other DNA
ccccctccccactcgagcct

SEQ ID NO: 3125 - DNA, 20 bp, synthetic construct
  source 1..20: mol_type = other DNA
aggctcgagtggggaggggg

SEQ ID NO: 3126 - DNA, 20 bp, synthetic construct
  source 1..20: mol_type = other DNA
ccccctccccactcgggccc

SEQ ID NO: 3127 - DNA, 20 bp, synthetic construct
  source 1..20: mol_type = other DNA
gggcccgagtggggaggggg

SEQ ID NO: 3128 - DNA, 20 bp, synthetic construct
  source 1..20: mol_type = other DNA
ccccctccccactcgggcct

SEQ ID NO: 3129 - DNA, 20 bp, synthetic construct
  source 1..20: mol_type = other DNA
aggcccgagtggggaggggg

SEQ ID NO: 3130 - DNA, 20 bp, synthetic construct
  source 1..20: mol_type = other DNA
ccccctccccactccagccc

SEQ ID NO: 3131 - DNA, 20 bp, synthetic construct
  source 1..20: mol_type = other DNA
gggctggagtggggaggggg

SEQ ID NO: 3132 - DNA, 20 bp, synthetic construct
  source 1..20: mol_type = other DNA
ccccctccccactccagcct

SEQ ID NO: 3133 - DNA, 20 bp, synthetic construct
  source 1..20: mol_type = other DNA
aggctggagtggggaggggg

SEQ ID NO: 3134 - DNA, 20 bp, synthetic construct
  source 1..20: mol_type = other DNA
ccccctccccactccggccc

SEQ ID NO: 3135 - DNA, 20 bp, synthetic construct
  source 1..20: mol_type = other DNA
gggccggagtggggaggggg

SEQ ID NO: 3136 - DNA, 20 bp, synthetic construct
  source 1..20: mol_type = other DNA
ccccctccccactccggcct

SEQ ID NO: 3137 - DNA, 20 bp, synthetic construct
  source 1..20: mol_type = other DNA
aggccggagtggggaggggg

SEQ ID NO: 3138 - DNA, 20 bp, synthetic construct
  source 1..20: mol_type = other DNA
ccccctccccggtcgagccc

SEQ ID NO: 3139 - DNA, 20 bp, synthetic construct
  source 1..20: mol_type = other DNA
gggctcgaccggggaggggg

SEQ ID NO: 3140 - DNA, 20 bp, synthetic construct
  source 1..20: mol_type = other DNA
ccccctccccggtcgagcct

SEQ ID NO: 3141 - DNA, 20 bp, synthetic construct
  source 1..20: mol_type = other DNA
aggctcgaccggggaggggg

SEQ ID NO: 3142 - DNA, 20 bp, synthetic construct
  source 1..20: mol_type = other DNA
ccccctccccggtcgggccc

SEQ ID NO: 3143 - DNA, 20 bp, synthetic construct
  source 1..20: mol_type = other DNA
gggcccgaccggggaggggg

SEQ ID NO: 3144 - DNA, 20 bp, synthetic construct
  source 1..20: mol_type = other DNA
ccccctccccggtcgggcct

SEQ ID NO: 3145 - DNA, 20 bp, synthetic construct
  source 1..20: mol_type = other DNA
aggcccgaccggggaggggg

SEQ ID NO: 3146 - DNA, 20 bp, synthetic construct
  source 1..20: mol_type = other DNA
ccccctccccggtccagccc

SEQ ID NO: 3147 - DNA, 20 bp, synthetic construct
  source 1..20: mol_type = other DNA
gggctggaccggggaggggg

SEQ ID NO: 3148 - DNA, 20 bp, synthetic construct
  source 1..20: mol_type = other DNA
ccccctccccggtccagcct

SEQ ID NO: 3149 - DNA, 20 bp, synthetic construct
  source 1..20: mol_type = other DNA
aggctggaccggggaggggg

SEQ ID NO: 3150 - DNA, 20 bp, synthetic construct
  source 1..20: mol_type = other DNA
ccccctccccggtccggccc

SEQ ID NO: 3151 - DNA, 20 bp, synthetic construct
  source 1..20: mol_type = other DNA
gggccggaccggggaggggg

SEQ ID NO: 3152 - DNA, 20 bp, synthetic construct
  source 1..20: mol_type = other DNA
ccccctccccggtccggcct

SEQ ID NO: 3153 - DNA, 20 bp, synthetic construct
  source 1..20: mol_type = other DNA
aggccggaccggggaggggg

SEQ ID NO: 3154 - DNA, 20 bp, synthetic construct
  source 1..20: mol_type = other DNA
ccccctccccgctcgagccc

SEQ ID NO: 3155 - DNA, 20 bp, synthetic construct
  source 1..20: mol_type = other DNA
gggctcgagcggggaggggg

SEQ ID NO: 3156 - DNA, 20 bp, synthetic construct
  source 1..20: mol_type = other DNA
ccccctccccgctcgagcct

SEQ ID NO: 3157 - DNA, 20 bp, synthetic construct
  source 1..20: mol_type = other DNA
aggctcgagcggggaggggg

SEQ ID NO: 3158 - DNA, 20 bp, synthetic construct
  source 1..20: mol_type = other DNA
ccccctccccgctcgggccc

SEQ ID NO: 3159 - DNA, 20 bp, synthetic construct
  source 1..20: mol_type = other DNA
gggcccgagcggggaggggg

SEQ ID NO: 3160 - DNA, 20 bp, synthetic construct
  source 1..20: mol_type = other DNA
ccccctccccgctcgggcct

SEQ ID NO: 3161 - DNA, 20 bp, synthetic construct
  source 1..20: mol_type = other DNA
aggcccgagcggggaggggg

SEQ ID NO: 3162 - DNA, 20 bp, synthetic construct
  source 1..20: mol_type = other DNA
ccccctccccgctccagccc

SEQ ID NO: 3163 - DNA, 20 bp, synthetic construct
  source 1..20: mol_type = other DNA
gggctggagcggggaggggg

SEQ ID NO: 3164 - DNA, 20 bp, synthetic construct
  source 1..20: mol_type = other DNA
ccccctccccgctccagcct

SEQ ID NO: 3165 - DNA, 20 bp, synthetic construct
  source 1..20: mol_type = other DNA
aggctggagcggggaggggg

SEQ ID NO: 3166 - DNA, 20 bp, synthetic construct
  source 1..20: mol_type = other DNA
ccccctccccgctccggccc

SEQ ID NO: 3167 - DNA, 20 bp, synthetic construct
  source 1..20: mol_type = other DNA
gggccggagcggggaggggg

SEQ ID NO: 3168 - DNA, 20 bp, synthetic construct
  source 1..20: mol_type = other DNA
ccccctccccgctccggcct

SEQ ID NO: 3169 - DNA, 20 bp, synthetic construct
  source 1..20: mol_type = other DNA
aggccggagcggggaggggg

SEQ ID NO: 3170 - DNA, 10 bp, synthetic construct
  source 1..10: mol_type = other DNA
aacatatggc

SEQ ID NO: 3171 - DNA, 10 bp, synthetic construct
  source 1..10: mol_type = other DNA
gccatatgtt

SEQ ID NO: 3172 - DNA, 10 bp, synthetic construct
  source 1..10: mol_type = other DNA
aacatatggt

SEQ ID NO: 3173 - DNA, 10 bp, synthetic construct
  source 1..10: mol_type = other DNA
accatatgtt

SEQ ID NO: 3174 - DNA, 10 bp, synthetic construct
  source 1..10: mol_type = other DNA
accatatggc

SEQ ID NO: 3175 - DNA, 10 bp, synthetic construct
  source 1..10: mol_type = other DNA
gccatatggt

SEQ ID NO: 3176 - DNA, 10 bp, synthetic construct
  source 1..10: mol_type = other DNA
accatatggt

SEQ ID NO: 3177 - DNA, 10 bp, synthetic construct
  source 1..10: mol_type = other DNA
accatatggt

SEQ ID NO: 3178 - DNA, 10 bp, synthetic construct
  source 1..10: mol_type = other DNA
ccacacccac

SEQ ID NO: 3179 - DNA, 10 bp, synthetic construct
  source 1..10: mol_type = other DNA
gtgggtgtgg

SEQ ID NO: 3180 - DNA, 19 bp, synthetic construct
  source 1..19: mol_type = other DNA
cttaatctacatttaacac

SEQ ID NO: 3181 - DNA, 19 bp, synthetic construct
  source 1..19: mol_type = other DNA
gtgttaaatgtagattaag

SEQ ID NO: 3182 - DNA, 19 bp, synthetic construct
  source 1..19: mol_type = other DNA
cttaatctacatttaacat

SEQ ID NO: 3183 - DNA, 19 bp, synthetic construct
  source 1..19: mol_type = other DNA
atgttaaatgtagattaag

SEQ ID NO: 3184 - DNA, 19 bp, synthetic construct
  source 1..19: mol_type = other DNA
cttaatctacgtttaacac

SEQ ID NO: 3185 - DNA, 19 bp, synthetic construct
  source 1..19: mol_type = other DNA
gtgttaaacgtagattaag

SEQ ID NO: 3186 - DNA, 19 bp, synthetic construct
  source 1..19: mol_type = other DNA
cttaatctacgtttaacat

SEQ ID NO: 3187 - DNA, 19 bp, synthetic construct
  source 1..19: mol_type = other DNA
atgttaaacgtagattaag

SEQ ID NO: 3188 - DNA, 10 bp, synthetic construct
  source 1..10: mol_type = other DNA
atcacgtgac

SEQ ID NO: 3189 - DNA, 10 bp, synthetic construct
  source 1..10: mol_type = other DNA
gtcacgtgat

SEQ ID NO: 3190 - DNA, 10 bp, synthetic construct
  source 1..10: mol_type = other DNA
atcacgtgat

SEQ ID NO: 3191 - DNA, 10 bp, synthetic construct
  source 1..10: mol_type = other DNA
atcacgtgat

SEQ ID NO: 3192 - DNA, 10 bp, synthetic construct
  source 1..10: mol_type = other DNA
gtcacgtgac

SEQ ID NO: 3193 - DNA, 10 bp, synthetic construct
  source 1..10: mol_type = other DNA
gtcacgtgac

SEQ ID NO: 3194 - DNA, 10 bp, synthetic construct
  source 1..10: mol_type = other DNA
gtcacgtgat

SEQ ID NO: 3195 - DNA, 10 bp, synthetic construct
  source 1..10: mol_type = other DNA
atcacgtgac

SEQ ID NO: 3196 - DNA, 11 bp, synthetic construct
  source 1..11: mol_type = other DNA
caccccctccc

SEQ ID NO: 3197 - DNA, 11 bp, synthetic construct
  source 1..11: mol_type = other DNA
gggagggggtg

SEQ ID NO: 3198 - DNA, 11 bp, synthetic construct
  source 1..11: mol_type = other DNA
cgccccctccc

SEQ ID NO: 3199 - DNA, 11 bp, synthetic construct
  source 1..11: mol_type = other DNA
gggagggggcg

SEQ ID NO: 3200 - DNA, 14 bp, synthetic construct
  source 1..14: mol_type = other DNA
acagtccacccctt

SEQ ID NO: 3201 - DNA, 14 bp, synthetic construct
  source 1..14: mol_type = other DNA
aaggggtggactgt

SEQ ID NO: 3202-3257 - skipped (56 entries)

SEQ ID NO: 3258 - DNA, 10 bp, synthetic construct
  source 1..10: mol_type = other DNA
atcacgtgac

SEQ ID NO: 3259 - DNA, 10 bp, synthetic construct
  source 1..10: mol_type = other DNA
gtcacgtgat

SEQ ID NO: 3260 - DNA, 10 bp, synthetic construct
  source 1..10: mol_type = other DNA
atcacgtgat

SEQ ID NO: 3261 - DNA, 10 bp, synthetic construct
  source 1..10: mol_type = other DNA
atcacgtgat

SEQ ID NO: 3262-3265 - skipped (4 entries)

SEQ ID NO: 3266 - DNA, 12 bp, synthetic construct
  source 1..12: mol_type = other DNA
cacagcaggggg

SEQ ID NO: 3267 - DNA, 12 bp, synthetic construct
  source 1..12: mol_type = other DNA
ccccctgctgtg

SEQ ID NO: 3268 - DNA, 18 bp, synthetic construct
  source 1..18: mol_type = other DNA
agttgagtgactgcagtt

SEQ ID NO: 3269 - DNA, 18 bp, synthetic construct
  source 1..18: mol_type = other DNA
aactgcagtcactcaact

SEQ ID NO: 3270 - DNA, 18 bp, synthetic construct
  source 1..18: mol_type = other DNA
agttgagtgactgcggtt

SEQ ID NO: 3271 - DNA, 18 bp, synthetic construct
  source 1..18: mol_type = other DNA
aaccgcagtcactcaact

SEQ ID NO: 3272 - DNA, 18 bp, synthetic construct
  source 1..18: mol_type = other DNA
agttgagtgactgtagtt

SEQ ID NO: 3273 - DNA, 18 bp, synthetic construct
  source 1..18: mol_type = other DNA
aactacagtcactcaact

SEQ ID NO: 3274 - DNA, 18 bp, synthetic construct
  source 1..18: mol_type = other DNA
agttgagtgactgtggtt

SEQ ID NO: 3275 - DNA, 18 bp, synthetic construct
  source 1..18: mol_type = other DNA
aaccacagtcactcaact

SEQ ID NO: 3276 - DNA, 21 bp, synthetic construct
  source 1..21: mol_type = other DNA
ccccccccccacctcctcccc

SEQ ID NO: 3277 - DNA, 21 bp, synthetic construct
  source 1..21: mol_type = other DNA
ggggaggaggtgggggggggg

SEQ ID NO: 3278 - DNA, 21 bp, synthetic construct
  source 1..21: mol_type = other DNA
ccccccccccacctcctccct

SEQ ID NO: 3279 - DNA, 21 bp, synthetic construct
  source 1..21: mol_type = other DNA
agggaggaggtgggggggggg

SEQ ID NO: 3280 - DNA, 21 bp, synthetic construct
  source 1..21: mol_type = other DNA
ccccccccccacctcctcctc

SEQ ID NO: 3281 - DNA, 21 bp, synthetic construct
  source 1..21: mol_type = other DNA
gaggaggaggtgggggggggg

SEQ ID NO: 3282 - DNA, 21 bp, synthetic construct
  source 1..21: mol_type = other DNA
ccccccccccacctcctcctt

SEQ ID NO: 3283 - DNA, 21 bp, synthetic construct
  source 1..21: mol_type = other DNA
aaggaggaggtgggggggggg

SEQ ID NO: 3284 - DNA, 21 bp, synthetic construct
  source 1..21: mol_type = other DNA
ccccccctccacctcctcccc

SEQ ID NO: 3285 - DNA, 21 bp, synthetic construct
  source 1..21: mol_type = other DNA
ggggaggaggtggaggggggg

SEQ ID NO: 3286 - DNA, 21 bp, synthetic construct
  source 1..21: mol_type = other DNA
ccccccctccacctcctccct

SEQ ID NO: 3287 - DNA, 21 bp, synthetic construct
  source 1..21: mol_type = other DNA
agggaggaggtggaggggggg

SEQ ID NO: 3288 - DNA, 21 bp, synthetic construct
  source 1..21: mol_type = other DNA
ccccccctccacctcctcctc

SEQ ID NO: 3289 - DNA, 21 bp, synthetic construct
  source 1..21: mol_type = other DNA
gaggaggaggtggaggggggg

SEQ ID NO: 3290 - DNA, 21 bp, synthetic construct
  source 1..21: mol_type = other DNA
ccccccctccacctcctcctt

SEQ ID NO: 3291 - DNA, 21 bp, synthetic construct
  source 1..21: mol_type = other DNA
aaggaggaggtggaggggggg

SEQ ID NO: 3292 - DNA, 21 bp, synthetic construct
  source 1..21: mol_type = other DNA
cccctcccccacctcctcccc

SEQ ID NO: 3293 - DNA, 21 bp, synthetic construct
  source 1..21: mol_type = other DNA
ggggaggaggtgggggagggg

SEQ ID NO: 3294 - DNA, 21 bp, synthetic construct
  source 1..21: mol_type = other DNA
cccctcccccacctcctccct

SEQ ID NO: 3295 - DNA, 21 bp, synthetic construct
  source 1..21: mol_type = other DNA
agggaggaggtgggggagggg

SEQ ID NO: 3296 - DNA, 21 bp, synthetic construct
  source 1..21: mol_type = other DNA
cccctcccccacctcctcctc

SEQ ID NO: 3297 - DNA, 21 bp, synthetic construct
  source 1..21: mol_type = other DNA
gaggaggaggtgggggagggg

SEQ ID NO: 3298 - DNA, 21 bp, synthetic construct
  source 1..21: mol_type = other DNA
cccctcccccacctcctcctt

SEQ ID NO: 3299 - DNA, 21 bp, synthetic construct
  source 1..21: mol_type = other DNA
aaggaggaggtgggggagggg

SEQ ID NO: 3300 - DNA, 21 bp, synthetic construct
  source 1..21: mol_type = other DNA
cccctcctccacctcctcccc

SEQ ID NO: 3301 - DNA, 21 bp, synthetic construct
  source 1..21: mol_type = other DNA
ggggaggaggtggaggagggg

SEQ ID NO: 3302 - DNA, 21 bp, synthetic construct
  source 1..21: mol_type = other DNA
cccctcctccacctcctccct

SEQ ID NO: 3303 - DNA, 21 bp, synthetic construct
  source 1..21: mol_type = other DNA
agggaggaggtggaggagggg

SEQ ID NO: 3304 - DNA, 21 bp, synthetic construct
  source 1..21: mol_type = other DNA
cccctcctccacctcctcctc

SEQ ID NO: 3305 - DNA, 21 bp, synthetic construct
  source 1..21: mol_type = other DNA
gaggaggaggtggaggagggg

SEQ ID NO: 3306 - DNA, 21 bp, synthetic construct
  source 1..21: mol_type = other DNA
cccctcctccacctcctcctt

SEQ ID NO: 3307 - DNA, 21 bp, synthetic construct
  source 1..21: mol_type = other DNA
aaggaggaggtggaggagggg

SEQ ID NO: 3308 - DNA, 21 bp, synthetic construct
  source 1..21: mol_type = other DNA
ctccccccccacctcctcccc

SEQ ID NO: 3309 - DNA, 21 bp, synthetic construct
  source 1..21: mol_type = other DNA
ggggaggaggtggggggggag

SEQ ID NO: 3310 - DNA, 21 bp, synthetic construct
  source 1..21: mol_type = other DNA
ctccccccccacctcctccct

SEQ ID NO: 3311 - DNA, 21 bp, synthetic construct
  source 1..21: mol_type = other DNA
agggaggaggtggggggggag

SEQ ID NO: 3312 - DNA, 21 bp, synthetic construct
  source 1..21: mol_type = other DNA
ctccccccccacctcctcctc

SEQ ID NO: 3313 - DNA, 21 bp, synthetic construct
  source 1..21: mol_type = other DNA
gaggaggaggtggggggggag

SEQ ID NO: 3314 - DNA, 21 bp, synthetic construct
  source 1..21: mol_type = other DNA
ctccccccccacctcctcctt

SEQ ID NO: 3315 - DNA, 21 bp, synthetic construct
  source 1..21: mol_type = other DNA
aaggaggaggtggggggggag

SEQ ID NO: 3316 - DNA, 21 bp, synthetic construct
  source 1..21: mol_type = other DNA
ctccccctccacctcctcccc

SEQ ID NO: 3317 - DNA, 21 bp, synthetic construct
  source 1..21: mol_type = other DNA
ggggaggaggtggagggggag

SEQ ID NO: 3318 - DNA, 21 bp, synthetic construct
  source 1..21: mol_type = other DNA
ctccccctccacctcctccct

SEQ ID NO: 3319 - DNA, 21 bp, synthetic construct
  source 1..21: mol_type = other DNA
agggaggaggtggagggggag

SEQ ID NO: 3320 - DNA, 21 bp, synthetic construct
  source 1..21: mol_type = other DNA
ctccccctccacctcctcctc

SEQ ID NO: 3321 - DNA, 21 bp, synthetic construct
  source 1..21: mol_type = other DNA
gaggaggaggtggagggggag

SEQ ID NO: 3322 - DNA, 21 bp, synthetic construct
  source 1..21: mol_type = other DNA
ctccccctccacctcctcctt

SEQ ID NO: 3323 - DNA, 21 bp, synthetic construct
  source 1..21: mol_type = other DNA
aaggaggaggtggagggggag

SEQ ID NO: 3324 - DNA, 21 bp, synthetic construct
  source 1..21: mol_type = other DNA
ctcctcccccacctcctcccc

SEQ ID NO: 3325 - DNA, 21 bp, synthetic construct
  source 1..21: mol_type = other DNA
ggggaggaggtgggggaggag

SEQ ID NO: 3326 - DNA, 21 bp, synthetic construct
  source 1..21: mol_type = other DNA
ctcctcccccacctcctccct

SEQ ID NO: 3327 - DNA, 21 bp, synthetic construct
  source 1..21: mol_type = other DNA
agggaggaggtgggggaggag

SEQ ID NO: 3328 - DNA, 21 bp, synthetic construct
  source 1..21: mol_type = other DNA
ctcctcccccacctcctcctc

SEQ ID NO: 3329 - DNA, 21 bp, synthetic construct
  source 1..21: mol_type = other DNA
gaggaggaggtgggggaggag

SEQ ID NO: 3330 - DNA, 21 bp, synthetic construct
  source 1..21: mol_type = other DNA
ctcctcccccacctcctcctt

SEQ ID NO: 3331 - DNA, 21 bp, synthetic construct
  source 1..21: mol_type = other DNA
aaggaggaggtgggggaggag

SEQ ID NO: 3332 - DNA, 21 bp, synthetic construct
  source 1..21: mol_type = other DNA
ctcctcctccacctcctcccc

SEQ ID NO: 3333 - DNA, 21 bp, synthetic construct
  source 1..21: mol_type = other DNA
ggggaggaggtggaggaggag

SEQ ID NO: 3334 - DNA, 21 bp, synthetic construct
  source 1..21: mol_type = other DNA
ctcctcctccacctcctccct

SEQ ID NO: 3335 - DNA, 21 bp, synthetic construct
  source 1..21: mol_type = other DNA
agggaggaggtggaggaggag

SEQ ID NO: 3336 - DNA, 21 bp, synthetic construct
  source 1..21: mol_type = other DNA
ctcctcctccacctcctcctc

SEQ ID NO: 3337 - DNA, 21 bp, synthetic construct
  source 1..21: mol_type = other DNA
gaggaggaggtggaggaggag

SEQ ID NO: 3338 - DNA, 21 bp, synthetic construct
  source 1..21: mol_type = other DNA
ctcctcctccacctcctcctt

SEQ ID NO: 3339 - DNA, 21 bp, synthetic construct
  source 1..21: mol_type = other DNA
aaggaggaggtggaggaggag

SEQ ID NO: 3340-3343 - skipped (4 entries)

SEQ ID NO: 3344 - DNA, 14 bp, synthetic construct
  source 1..14: mol_type = other DNA
ccttgccccgcccc

SEQ ID NO: 3345 - DNA, 14 bp, synthetic construct
  source 1..14: mol_type = other DNA
ggggcggggcaagg

SEQ ID NO: 3346 - DNA, 10 bp, synthetic construct
  source 1..10: mol_type = other DNA
aacaactgtt

SEQ ID NO: 3347 - DNA, 10 bp, synthetic construct
  source 1..10: mol_type = other DNA
aacagttgtt

SEQ ID NO: 3348 - DNA, 10 bp, synthetic construct
  source 1..10: mol_type = other DNA
aacagctgtt

SEQ ID NO: 3349 - DNA, 10 bp, synthetic construct
  source 1..10: mol_type = other DNA
aacagctgtt

SEQ ID NO: 3350 - DNA, 11 bp, synthetic construct
  source 1..11: mol_type = other DNA
aaccgttattc

SEQ ID NO: 3351 - DNA, 11 bp, synthetic construct
  source 1..11: mol_type = other DNA
gaataacggtt

SEQ ID NO: 3352 - DNA, 11 bp, synthetic construct
  source 1..11: mol_type = other DNA
aaccgttattt

SEQ ID NO: 3353 - DNA, 11 bp, synthetic construct
  source 1..11: mol_type = other DNA
aaataacggtt

SEQ ID NO: 3354 - DNA, 11 bp, synthetic construct
  source 1..11: mol_type = other DNA
taccgttattc

SEQ ID NO: 3355 - DNA, 11 bp, synthetic construct
  source 1..11: mol_type = other DNA
gaataacggta

SEQ ID NO: 3356 - DNA, 11 bp, synthetic construct
  source 1..11: mol_type = other DNA
taccgttattt

SEQ ID NO: 3357 - DNA, 11 bp, synthetic construct
  source 1..11: mol_type = other DNA
aaataacggta

SEQ ID NO: 3358 - DNA, 12 bp, synthetic construct
  source 1..12: mol_type = other DNA
gtaaatattgac

SEQ ID NO: 3359 - DNA, 12 bp, synthetic construct
  source 1..12: mol_type = other DNA
gtcaatatttac

SEQ ID NO: 3360 - DNA, 12 bp, synthetic construct
  source 1..12: mol_type = other DNA
gtaaatatttac

SEQ ID NO: 3361 - DNA, 12 bp, synthetic construct
  source 1..12: mol_type = other DNA
gtaaatatttac

SEQ ID NO: 3362 - DNA, 12 bp, synthetic construct
  source 1..12: mol_type = other DNA
gtcaatattgac

SEQ ID NO: 3363 - DNA, 12 bp, synthetic construct
  source 1..12: mol_type = other DNA
gtcaatattgac

SEQ ID NO: 3364 - DNA, 12 bp, synthetic construct
  source 1..12: mol_type = other DNA
gtcaatatttac

SEQ ID NO: 3365 - DNA, 12 bp, synthetic construct
  source 1..12: mol_type = other DNA
gtaaatattgac

SEQ ID NO: 3366 - DNA, 10 bp, synthetic construct
  source 1..10: mol_type = other DNA
accatctgtt

SEQ ID NO: 3367 - DNA, 10 bp, synthetic construct
  source 1..10: mol_type = other DNA
aacagatggt

SEQ ID NO: 3368 - DNA, 12 bp, synthetic construct
  source 1..12: mol_type = other DNA
cgccccctgaca

SEQ ID NO: 3369 - DNA, 12 bp, synthetic construct
  source 1..12: mol_type = other DNA
tgtcagggggcg

SEQ ID NO: 3370 - DNA, 12 bp, synthetic construct
  source 1..12: mol_type = other DNA
cgccccctggca

SEQ ID NO: 3371 - DNA, 12 bp, synthetic construct
  source 1..12: mol_type = other DNA
tgccagggggcg

SEQ ID NO: 3372 - DNA, 12 bp, synthetic construct
  source 1..12: mol_type = other DNA
tgccccctgaca

SEQ ID NO: 3373 - DNA, 12 bp, synthetic construct
  source 1..12: mol_type = other DNA
tgtcagggggca

SEQ ID NO: 3374 - DNA, 12 bp, synthetic construct
  source 1..12: mol_type = other DNA
tgccccctggca

SEQ ID NO: 3375 - DNA, 12 bp, synthetic construct
  source 1..12: mol_type = other DNA
tgccagggggca

SEQ ID NO: 3376-3379 - skipped (4 entries)

SEQ ID NO: 3380 - DNA, 25 bp, synthetic construct
  source 1..25: mol_type = other DNA
cctcatggtgccctactcccttgtg

SEQ ID NO: 3381 - DNA, 25 bp, synthetic construct
  source 1..25: mol_type = other DNA
cacaagggagtagggcaccatgagg

SEQ ID NO: 3382 - DNA, 25 bp, synthetic construct
  source 1..25: mol_type = other DNA
cctcatggtgccctattcccttgtg

SEQ ID NO: 3383 - DNA, 25 bp, synthetic construct
  source 1..25: mol_type = other DNA
cacaagggaatagggcaccatgagg

SEQ ID NO: 3384 - DNA, 25 bp, synthetic construct
  source 1..25: mol_type = other DNA
cctcatggtgcccttctcccttgtg

SEQ ID NO: 3385 - DNA, 25 bp, synthetic construct
  source 1..25: mol_type = other DNA
cacaagggagaagggcaccatgagg

SEQ ID NO: 3386 - DNA, 25 bp, synthetic construct
  source 1..25: mol_type = other DNA
cctcatggtgcccttttcccttgtg

SEQ ID NO: 3387 - DNA, 25 bp, synthetic construct
  source 1..25: mol_type = other DNA
cacaagggaaaagggcaccatgagg

SEQ ID NO: 3388 - DNA, 25 bp, synthetic construct
  source 1..25: mol_type = other DNA
cctcatggtgccttactcccttgtg

SEQ ID NO: 3389 - DNA, 25 bp, synthetic construct
  source 1..25: mol_type = other DNA
cacaagggagtaaggcaccatgagg

SEQ ID NO: 3390 - DNA, 25 bp, synthetic construct
  source 1..25: mol_type = other DNA
cctcatggtgccttattcccttgtg

SEQ ID NO: 3391 - DNA, 25 bp, synthetic construct
  source 1..25: mol_type = other DNA
cacaagggaataaggcaccatgagg

SEQ ID NO: 3392 - DNA, 25 bp, synthetic construct
  source 1..25: mol_type = other DNA
cctcatggtgcctttctcccttgtg

SEQ ID NO: 3393 - DNA, 25 bp, synthetic construct
  source 1..25: mol_type = other DNA
cacaagggagaaaggcaccatgagg

SEQ ID NO: 3394 - DNA, 25 bp, synthetic construct
  source 1..25: mol_type = other DNA
cctcatggtgcctttttcccttgtg

SEQ ID NO: 3395 - DNA, 25 bp, synthetic construct
  source 1..25: mol_type = other DNA
cacaagggaaaaaggcaccatgagg

SEQ ID NO: 3396 - DNA, 25 bp, synthetic construct
  source 1..25: mol_type = other DNA
cctcatggtgtcctactcccttgtg

SEQ ID NO: 3397 - DNA, 25 bp, synthetic construct
  source 1..25: mol_type = other DNA
cacaagggagtaggacaccatgagg

SEQ ID NO: 3398 - DNA, 25 bp, synthetic construct
  source 1..25: mol_type = other DNA
cctcatggtgtcctattcccttgtg

SEQ ID NO: 3399 - DNA, 25 bp, synthetic construct
  source 1..25: mol_type = other DNA
cacaagggaataggacaccatgagg

SEQ ID NO: 3400 - DNA, 25 bp, synthetic construct
  source 1..25: mol_type = other DNA
cctcatggtgtccttctcccttgtg

SEQ ID NO: 3401 - DNA, 25 bp, synthetic construct
  source 1..25: mol_type = other DNA
cacaagggagaaggacaccatgagg

SEQ ID NO: 3402 - DNA, 25 bp, synthetic construct
  source 1..25: mol_type = other DNA
cctcatggtgtccttttcccttgtg

SEQ ID NO: 3403 - DNA, 25 bp, synthetic construct
  source 1..25: mol_type = other DNA
cacaagggaaaaggacaccatgagg

SEQ ID NO: 3404 - DNA, 25 bp, synthetic construct
  source 1..25: mol_type = other DNA
cctcatggtgtcttactcccttgtg

SEQ ID NO: 3405 - DNA, 25 bp, synthetic construct
  source 1..25: mol_type = other DNA
cacaagggagtaagacaccatgagg

SEQ ID NO: 3406 - DNA, 25 bp, synthetic construct
  source 1..25: mol_type = other DNA
cctcatggtgtcttattcccttgtg

SEQ ID NO: 3407 - DNA, 25 bp, synthetic construct
  source 1..25: mol_type = other DNA
cacaagggaataagacaccatgagg

SEQ ID NO: 3408 - DNA, 25 bp, synthetic construct
  source 1..25: mol_type = other DNA
cctcatggtgtctttctcccttgtg

SEQ ID NO: 3409 - DNA, 25 bp, synthetic construct
  source 1..25: mol_type = other DNA
cacaagggagaaagacaccatgagg

SEQ ID NO: 3410 - DNA, 25 bp, synthetic construct
  source 1..25: mol_type = other DNA
cctcatggtgtctttttcccttgtg

SEQ ID NO: 3411 - DNA, 25 bp, synthetic construct
  source 1..25: mol_type = other DNA
cacaagggaaaaagacaccatgagg

SEQ ID NO: 3412 - DNA, 17 bp, synthetic construct
  source 1..17: mol_type = other DNA
tcctacccggcaactgc

SEQ ID NO: 3413 - DNA, 17 bp, synthetic construct
  source 1..17: mol_type = other DNA
gcagttgccgggtagga

SEQ ID NO: 3414 - DNA, 17 bp, synthetic construct
  source 1..17: mol_type = other DNA
tcctacccggcaactgt

SEQ ID NO: 3415 - DNA, 17 bp, synthetic construct
  source 1..17: mol_type = other DNA
acagttgccgggtagga

SEQ ID NO: 3416 - DNA, 17 bp, synthetic construct
  source 1..17: mol_type = other DNA
tcctacccggcagctgc

SEQ ID NO: 3417 - DNA, 17 bp, synthetic construct
  source 1..17: mol_type = other DNA
gcagctgccgggtagga

SEQ ID NO: 3418 - DNA, 17 bp, synthetic construct
  source 1..17: mol_type = other DNA
tcctacccggcagctgt

SEQ ID NO: 3419 - DNA, 17 bp, synthetic construct
  source 1..17: mol_type = other DNA
acagctgccgggtagga

SEQ ID NO: 3420 - DNA, 14 bp, synthetic construct
  source 1..14: mol_type = other DNA
cagataacatctaa

SEQ ID NO: 3421 - DNA, 14 bp, synthetic construct
  source 1..14: mol_type = other DNA
ttagatgttatctg

SEQ ID NO: 3422 - DNA, 14 bp, synthetic construct
  source 1..14: mol_type = other DNA
cagataacatctac

SEQ ID NO: 3423 - DNA, 14 bp, synthetic construct
  source 1..14: mol_type = other DNA
gtagatgttatctg

SEQ ID NO: 3424 - DNA, 14 bp, synthetic construct
  source 1..14: mol_type = other DNA
cagataacatctat

SEQ ID NO: 3425 - DNA, 14 bp, synthetic construct
  source 1..14: mol_type = other DNA
atagatgttatctg

SEQ ID NO: 3426 - DNA, 14 bp, synthetic construct
  source 1..14: mol_type = other DNA
cagataacatctca

SEQ ID NO: 3427 - DNA, 14 bp, synthetic construct
  source 1..14: mol_type = other DNA
tgagatgttatctg

SEQ ID NO: 3428 - DNA, 14 bp, synthetic construct
  source 1..14: mol_type = other DNA
cagataacatctcc

SEQ ID NO: 3429 - DNA, 14 bp, synthetic construct
  source 1..14: mol_type = other DNA
ggagatgttatctg

SEQ ID NO: 3430 - DNA, 14 bp, synthetic construct
  source 1..14: mol_type = other DNA
cagataacatctct

SEQ ID NO: 3431 - DNA, 14 bp, synthetic construct
  source 1..14: mol_type = other DNA
agagatgttatctg

SEQ ID NO: 3432 - DNA, 14 bp, synthetic construct
  source 1..14: mol_type = other DNA
cagataacatctga

SEQ ID NO: 3433 - DNA, 14 bp, synthetic construct
  source 1..14: mol_type = other DNA
tcagatgttatctg

SEQ ID NO: 3434 - DNA, 14 bp, synthetic construct
  source 1..14: mol_type = other DNA
cagataacatctgc

SEQ ID NO: 3435 - DNA, 14 bp, synthetic construct
  source 1..14: mol_type = other DNA
gcagatgttatctg

SEQ ID NO: 3436 - DNA, 14 bp, synthetic construct
  source 1..14: mol_type = other DNA
cagataacatctgt

SEQ ID NO: 3437 - DNA, 14 bp, synthetic construct
  source 1..14: mol_type = other DNA
acagatgttatctg

SEQ ID NO: 3438 - DNA, 14 bp, synthetic construct
  source 1..14: mol_type = other DNA
cagataatatctaa

SEQ ID NO: 3439 - DNA, 14 bp, synthetic construct
  source 1..14: mol_type = other DNA
ttagatattatctg

SEQ ID NO: 3440 - DNA, 14 bp, synthetic construct
  source 1..14: mol_type = other DNA
cagataatatctac

SEQ ID NO: 3441 - DNA, 14 bp, synthetic construct
  source 1..14: mol_type = other DNA
gtagatattatctg

SEQ ID NO: 3442 - DNA, 14 bp, synthetic construct
  source 1..14: mol_type = other DNA
cagataatatctat

SEQ ID NO: 3443 - DNA, 14 bp, synthetic construct
  source 1..14: mol_type = other DNA
atagatattatctg

SEQ ID NO: 3444 - DNA, 14 bp, synthetic construct
  source 1..14: mol_type = other DNA
cagataatatctca

SEQ ID NO: 3445 - DNA, 14 bp, synthetic construct
  source 1..14: mol_type = other DNA
tgagatattatctg

SEQ ID NO: 3446 - DNA, 14 bp, synthetic construct
  source 1..14: mol_type = other DNA
cagataatatctcc

SEQ ID NO: 3447 - DNA, 14 bp, synthetic construct
  source 1..14: mol_type = other DNA
ggagatattatctg

SEQ ID NO: 3448 - DNA, 14 bp, synthetic construct
  source 1..14: mol_type = other DNA
cagataatatctct

SEQ ID NO: 3449 - DNA, 14 bp, synthetic construct
  source 1..14: mol_type = other DNA
agagatattatctg

SEQ ID NO: 3450 - DNA, 14 bp, synthetic construct
  source 1..14: mol_type = other DNA
cagataatatctga

SEQ ID NO: 3451 - DNA, 14 bp, synthetic construct
  source 1..14: mol_type = other DNA
tcagatattatctg

SEQ ID NO: 3452 - DNA, 14 bp, synthetic construct
  source 1..14: mol_type = other DNA
cagataatatctgc

SEQ ID NO: 3453 - DNA, 14 bp, synthetic construct
  source 1..14: mol_type = other DNA
gcagatattatctg

SEQ ID NO: 3454 - DNA, 14 bp, synthetic construct
  source 1..14: mol_type = other DNA
cagataatatctgt

SEQ ID NO: 3455 - DNA, 14 bp, synthetic construct
  source 1..14: mol_type = other DNA
acagatattatctg

SEQ ID NO: 3456 - DNA, 14 bp, synthetic construct
  source 1..14: mol_type = other DNA
cagatatcatctaa

SEQ ID NO: 3457 - DNA, 14 bp, synthetic construct
  source 1..14: mol_type = other DNA
ttagatgatatctg

SEQ ID NO: 3458 - DNA, 14 bp, synthetic construct
  source 1..14: mol_type = other DNA
cagatatcatctac

SEQ ID NO: 3459 - DNA, 14 bp, synthetic construct
  source 1..14: mol_type = other DNA
gtagatgatatctg

SEQ ID NO: 3460 - DNA, 14 bp, synthetic construct
  source 1..14: mol_type = other DNA
cagatatcatctat

SEQ ID NO: 3461 - DNA, 14 bp, synthetic construct
  source 1..14: mol_type = other DNA
atagatgatatctg

SEQ ID NO: 3462 - DNA, 14 bp, synthetic construct
  source 1..14: mol_type = other DNA
cagatatcatctca

SEQ ID NO: 3463 - DNA, 14 bp, synthetic construct
  source 1..14: mol_type = other DNA
tgagatgatatctg

SEQ ID NO: 3464 - DNA, 14 bp, synthetic construct
  source 1..14: mol_type = other DNA
cagatatcatctcc

SEQ ID NO: 3465 - DNA, 14 bp, synthetic construct
  source 1..14: mol_type = other DNA
ggagatgatatctg

SEQ ID NO: 3466 - DNA, 14 bp, synthetic construct
  source 1..14: mol_type = other DNA
cagatatcatctct

SEQ ID NO: 3467 - DNA, 14 bp, synthetic construct
  source 1..14: mol_type = other DNA
agagatgatatctg

SEQ ID NO: 3468 - DNA, 14 bp, synthetic construct
  source 1..14: mol_type = other DNA
cagatatcatctga

SEQ ID NO: 3469 - DNA, 14 bp, synthetic construct
  source 1..14: mol_type = other DNA
tcagatgatatctg

SEQ ID NO: 3470 - DNA, 14 bp, synthetic construct
  source 1..14: mol_type = other DNA
cagatatcatctgc

SEQ ID NO: 3471 - DNA, 14 bp, synthetic construct
  source 1..14: mol_type = other DNA
gcagatgatatctg

SEQ ID NO: 3472 - DNA, 14 bp, synthetic construct
  source 1..14: mol_type = other DNA
cagatatcatctgt

SEQ ID NO: 3473 - DNA, 14 bp, synthetic construct
  source 1..14: mol_type = other DNA
acagatgatatctg

SEQ ID NO: 3474 - DNA, 14 bp, synthetic construct
  source 1..14: mol_type = other DNA
cagatattatctaa

SEQ ID NO: 3475 - DNA, 14 bp, synthetic construct
  source 1..14: mol_type = other DNA
ttagataatatctg

SEQ ID NO: 3476 - DNA, 14 bp, synthetic construct
  source 1..14: mol_type = other DNA
cagatattatctac

SEQ ID NO: 3477 - DNA, 14 bp, synthetic construct
  source 1..14: mol_type = other DNA
gtagataatatctg

SEQ ID NO: 3478 - DNA, 14 bp, synthetic construct
  source 1..14: mol_type = other DNA
cagatattatctat

SEQ ID NO: 3479 - DNA, 14 bp, synthetic construct
  source 1..14: mol_type = other DNA
atagataatatctg

SEQ ID NO: 3480 - DNA, 14 bp, synthetic construct
  source 1..14: mol_type = other DNA
cagatattatctca

SEQ ID NO: 3481 - DNA, 14 bp, synthetic construct
  source 1..14: mol_type = other DNA
tgagataatatctg

SEQ ID NO: 3482 - DNA, 14 bp, synthetic construct
  source 1..14: mol_type = other DNA
cagatattatctcc

SEQ ID NO: 3483 - DNA, 14 bp, synthetic construct
  source 1..14: mol_type = other DNA
ggagataatatctg

SEQ ID NO: 3484 - DNA, 14 bp, synthetic construct
  source 1..14: mol_type = other DNA
cagatattatctct

SEQ ID NO: 3485 - DNA, 14 bp, synthetic construct
  source 1..14: mol_type = other DNA
agagataatatctg

SEQ ID NO: 3486 - DNA, 14 bp, synthetic construct
  source 1..14: mol_type = other DNA
cagatattatctga

SEQ ID NO: 3487 - DNA, 14 bp, synthetic construct
  source 1..14: mol_type = other DNA
tcagataatatctg

SEQ ID NO: 3488 - DNA, 14 bp, synthetic construct
  source 1..14: mol_type = other DNA
cagatattatctgc

SEQ ID NO: 3489 - DNA, 14 bp, synthetic construct
  source 1..14: mol_type = other DNA
gcagataatatctg

SEQ ID NO: 3490 - DNA, 14 bp, synthetic construct
  source 1..14: mol_type = other DNA
cagatattatctgt

SEQ ID NO: 3491 - DNA, 14 bp, synthetic construct
  source 1..14: mol_type = other DNA
acagataatatctg

SEQ ID NO: 3492 - DNA, 14 bp, synthetic construct
  source 1..14: mol_type = other DNA
gagataacatctaa

SEQ ID NO: 3493 - DNA, 14 bp, synthetic construct
  source 1..14: mol_type = other DNA
ttagatgttatctc

SEQ ID NO: 3494 - DNA, 14 bp, synthetic construct
  source 1..14: mol_type = other DNA
gagataacatctac

SEQ ID NO: 3495 - DNA, 14 bp, synthetic construct
  source 1..14: mol_type = other DNA
gtagatgttatctc

SEQ ID NO: 3496 - DNA, 14 bp, synthetic construct
  source 1..14: mol_type = other DNA
gagataacatctat

SEQ ID NO: 3497 - DNA, 14 bp, synthetic construct
  source 1..14: mol_type = other DNA
atagatgttatctc

SEQ ID NO: 3498 - DNA, 14 bp, synthetic construct
  source 1..14: mol_type = other DNA
gagataacatctca

SEQ ID NO: 3499 - DNA, 14 bp, synthetic construct
  source 1..14: mol_type = other DNA
tgagatgttatctc

SEQ ID NO: 3500 - DNA, 14 bp, synthetic construct
  source 1..14: mol_type = other DNA
gagataacatctcc

SEQ ID NO: 3501 - DNA, 14 bp, synthetic construct
  source 1..14: mol_type = other DNA
ggagatgttatctc

SEQ ID NO: 3502 - DNA, 14 bp, synthetic construct
  source 1..14: mol_type = other DNA
gagataacatctct

SEQ ID NO: 3503 - DNA, 14 bp, synthetic construct
  source 1..14: mol_type = other DNA
agagatgttatctc

SEQ ID NO: 3504 - DNA, 14 bp, synthetic construct
  source 1..14: mol_type = other DNA
gagataacatctga

SEQ ID NO: 3505 - DNA, 14 bp, synthetic construct
  source 1..14: mol_type = other DNA
tcagatgttatctc

SEQ ID NO: 3506 - DNA, 14 bp, synthetic construct
  source 1..14: mol_type = other DNA
gagataacatctgc

SEQ ID NO: 3507 - DNA, 14 bp, synthetic construct
  source 1..14: mol_type = other DNA
gcagatgttatctc

SEQ ID NO: 3508 - DNA, 14 bp, synthetic construct
  source 1..14: mol_type = other DNA
gagataacatctgt

SEQ ID NO: 3509 - DNA, 14 bp, synthetic construct
  source 1..14: mol_type = other DNA
acagatgttatctc

SEQ ID NO: 3510 - DNA, 14 bp, synthetic construct
  source 1..14: mol_type = other DNA
gagataatatctaa

SEQ ID NO: 3511 - DNA, 14 bp, synthetic construct
  source 1..14: mol_type = other DNA
ttagatattatctc

SEQ ID NO: 3512 - DNA, 14 bp, synthetic construct
  source 1..14: mol_type = other DNA
gagataatatctac

SEQ ID NO: 3513 - DNA, 14 bp, synthetic construct
  source 1..14: mol_type = other DNA
gtagatattatctc

SEQ ID NO: 3514 - DNA, 14 bp, synthetic construct
  source 1..14: mol_type = other DNA
gagataatatctat

SEQ ID NO: 3515 - DNA, 14 bp, synthetic construct
  source 1..14: mol_type = other DNA
atagatattatctc

SEQ ID NO: 3516 - DNA, 14 bp, synthetic construct
  source 1..14: mol_type = other DNA
gagataatatctca

SEQ ID NO: 3517 - DNA, 14 bp, synthetic construct
  source 1..14: mol_type = other DNA
tgagatattatctc

SEQ ID NO: 3518 - DNA, 14 bp, synthetic construct
  source 1..14: mol_type = other DNA
gagataatatctcc

SEQ ID NO: 3519 - DNA, 14 bp, synthetic construct
  source 1..14: mol_type = other DNA
ggagatattatctc

SEQ ID NO: 3520 - DNA, 14 bp, synthetic construct
  source 1..14: mol_type = other DNA
gagataatatctct

SEQ ID NO: 3521 - DNA, 14 bp, synthetic construct
  source 1..14: mol_type = other DNA
agagatattatctc

SEQ ID NO: 3522 - DNA, 14 bp, synthetic construct
  source 1..14: mol_type = other DNA
gagataatatctga

SEQ ID NO: 3523 - DNA, 14 bp, synthetic construct
  source 1..14: mol_type = other DNA
tcagatattatctc

SEQ ID NO: 3524 - DNA, 14 bp, synthetic construct
  source 1..14: mol_type = other DNA
gagataatatctgc

SEQ ID NO: 3525 - DNA, 14 bp, synthetic construct
  source 1..14: mol_type = other DNA
gcagatattatctc

SEQ ID NO: 3526 - DNA, 14 bp, synthetic construct
  source 1..14: mol_type = other DNA
gagataatatctgt

SEQ ID NO: 3527 - DNA, 14 bp, synthetic construct
  source 1..14: mol_type = other DNA
acagatattatctc

SEQ ID NO: 3528 - DNA, 14 bp, synthetic construct
  source 1..14: mol_type = other DNA
gagatatcatctaa

SEQ ID NO: 3529 - DNA, 14 bp, synthetic construct
  source 1..14: mol_type = other DNA
ttagatgatatctc

SEQ ID NO: 3530 - DNA, 14 bp, synthetic construct
  source 1..14: mol_type = other DNA
gagatatcatctac

SEQ ID NO: 3531 - DNA, 14 bp, synthetic construct
  source 1..14: mol_type = other DNA
gtagatgatatctc

SEQ ID NO: 3532 - DNA, 14 bp, synthetic construct
  source 1..14: mol_type = other DNA
gagatatcatctat

SEQ ID NO: 3533 - DNA, 14 bp, synthetic construct
  source 1..14: mol_type = other DNA
atagatgatatctc

SEQ ID NO: 3534 - DNA, 14 bp, synthetic construct
  source 1..14: mol_type = other DNA
gagatatcatctca

SEQ ID NO: 3535 - DNA, 14 bp, synthetic construct
  source 1..14: mol_type = other DNA
tgagatgatatctc

SEQ ID NO: 3536 - DNA, 14 bp, synthetic construct
  source 1..14: mol_type = other DNA
gagatatcatctcc

SEQ ID NO: 3537 - DNA, 14 bp, synthetic construct
  source 1..14: mol_type = other DNA
ggagatgatatctc

SEQ ID NO: 3538 - DNA, 14 bp, synthetic construct
  source 1..14: mol_type = other DNA
gagatatcatctct

SEQ ID NO: 3539 - DNA, 14 bp, synthetic construct
  source 1..14: mol_type = other DNA
agagatgatatctc

SEQ ID NO: 3540 - DNA, 14 bp, synthetic construct
  source 1..14: mol_type = other DNA
gagatatcatctga

SEQ ID NO: 3541 - DNA, 14 bp, synthetic construct
  source 1..14: mol_type = other DNA
tcagatgatatctc

SEQ ID NO: 3542 - DNA, 14 bp, synthetic construct
  source 1..14: mol_type = other DNA
gagatatcatctgc

SEQ ID NO: 3543 - DNA, 14 bp, synthetic construct
  source 1..14: mol_type = other DNA
gcagatgatatctc

SEQ ID NO: 3544 - DNA, 14 bp, synthetic construct
  source 1..14: mol_type = other DNA
gagatatcatctgt

SEQ ID NO: 3545 - DNA, 14 bp, synthetic construct
  source 1..14: mol_type = other DNA
acagatgatatctc

SEQ ID NO: 3546 - DNA, 14 bp, synthetic construct
  source 1..14: mol_type = other DNA
gagatattatctaa

SEQ ID NO: 3547 - DNA, 14 bp, synthetic construct
  source 1..14: mol_type = other DNA
ttagataatatctc

SEQ ID NO: 3548 - DNA, 14 bp, synthetic construct
  source 1..14: mol_type = other DNA
gagatattatctac

SEQ ID NO: 3549 - DNA, 14 bp, synthetic construct
  source 1..14: mol_type = other DNA
gtagataatatctc

SEQ ID NO: 3550 - DNA, 14 bp, synthetic construct
  source 1..14: mol_type = other DNA
gagatattatctat

SEQ ID NO: 3551 - DNA, 14 bp, synthetic construct
  source 1..14: mol_type = other DNA
atagataatatctc

SEQ ID NO: 3552 - DNA, 14 bp, synthetic construct
  source 1..14: mol_type = other DNA
gagatattatctca

SEQ ID NO: 3553 - DNA, 14 bp, synthetic construct
  source 1..14: mol_type = other DNA
tgagataatatctc

SEQ ID NO: 3554 - DNA, 14 bp, synthetic construct
  source 1..14: mol_type = other DNA
gagatattatctcc

SEQ ID NO: 3555 - DNA, 14 bp, synthetic construct
  source 1..14: mol_type = other DNA
ggagataatatctc

SEQ ID NO: 3556 - DNA, 14 bp, synthetic construct
  source 1..14: mol_type = other DNA
gagatattatctct

SEQ ID NO: 3557 - DNA, 14 bp, synthetic construct
  source 1..14: mol_type = other DNA
agagataatatctc

SEQ ID NO: 3558 - DNA, 14 bp, synthetic construct
  source 1..14: mol_type = other DNA
gagatattatctga

SEQ ID NO: 3559 - DNA, 14 bp, synthetic construct
  source 1..14: mol_type = other DNA
tcagataatatctc

SEQ ID NO: 3560 - DNA, 14 bp, synthetic construct
  source 1..14: mol_type = other DNA
gagatattatctgc

SEQ ID NO: 3561 - DNA, 14 bp, synthetic construct
  source 1..14: mol_type = other DNA
gcagataatatctc

SEQ ID NO: 3562 - DNA, 14 bp, synthetic construct
  source 1..14: mol_type = other DNA
gagatattatctgt

SEQ ID NO: 3563 - DNA, 14 bp, synthetic construct
  source 1..14: mol_type = other DNA
acagataatatctc

SEQ ID NO: 3564 - DNA, 14 bp, synthetic construct
  source 1..14: mol_type = other DNA
tagataacatctaa

SEQ ID NO: 3565 - DNA, 14 bp, synthetic construct
  source 1..14: mol_type = other DNA
ttagatgttatcta

SEQ ID NO: 3566 - DNA, 14 bp, synthetic construct
  source 1..14: mol_type = other DNA
tagataacatctac

SEQ ID NO: 3567 - DNA, 14 bp, synthetic construct
  source 1..14: mol_type = other DNA
gtagatgttatcta

SEQ ID NO: 3568 - DNA, 14 bp, synthetic construct
  source 1..14: mol_type = other DNA
tagataacatctat

SEQ ID NO: 3569 - DNA, 14 bp, synthetic construct
  source 1..14: mol_type = other DNA
atagatgttatcta

SEQ ID NO: 3570 - DNA, 14 bp, synthetic construct
  source 1..14: mol_type = other DNA
tagataacatctca

SEQ ID NO: 3571 - DNA, 14 bp, synthetic construct
  source 1..14: mol_type = other DNA
tgagatgttatcta

SEQ ID NO: 3572 - DNA, 14 bp, synthetic construct
  source 1..14: mol_type = other DNA
tagataacatctcc

SEQ ID NO: 3573 - DNA, 14 bp, synthetic construct
  source 1..14: mol_type = other DNA
ggagatgttatcta

SEQ ID NO: 3574 - DNA, 14 bp, synthetic construct
  source 1..14: mol_type = other DNA
tagataacatctct

SEQ ID NO: 3575 - DNA, 14 bp, synthetic construct
  source 1..14: mol_type = other DNA
agagatgttatcta

SEQ ID NO: 3576 - DNA, 14 bp, synthetic construct
  source 1..14: mol_type = other DNA
tagataacatctga

SEQ ID NO: 3577 - DNA, 14 bp, synthetic construct
  source 1..14: mol_type = other DNA
tcagatgttatcta

SEQ ID NO: 3578 - DNA, 14 bp, synthetic construct
  source 1..14: mol_type = other DNA
tagataacatctgc

SEQ ID NO: 3579 - DNA, 14 bp, synthetic construct
  source 1..14: mol_type = other DNA
gcagatgttatcta

SEQ ID NO: 3580 - DNA, 14 bp, synthetic construct
  source 1..14: mol_type = other DNA
tagataacatctgt

SEQ ID NO: 3581 - DNA, 14 bp, synthetic construct
  source 1..14: mol_type = other DNA
acagatgttatcta

SEQ ID NO: 3582 - DNA, 14 bp, synthetic construct
  source 1..14: mol_type = other DNA
tagataatatctaa

SEQ ID NO: 3583 - DNA, 14 bp, synthetic construct
  source 1..14: mol_type = other DNA
ttagatattatcta

SEQ ID NO: 3584 - DNA, 14 bp, synthetic construct
  source 1..14: mol_type = other DNA
tagataatatctac

SEQ ID NO: 3585 - DNA, 14 bp, synthetic construct
  source 1..14: mol_type = other DNA
gtagatattatcta

SEQ ID NO: 3586 - DNA, 14 bp, synthetic construct
  source 1..14: mol_type = other DNA
tagataatatctat

SEQ ID NO: 3587 - DNA, 14 bp, synthetic construct
  source 1..14: mol_type = other DNA
atagatattatcta

SEQ ID NO: 3588 - DNA, 14 bp, synthetic construct
  source 1..14: mol_type = other DNA
tagataatatctca

SEQ ID NO: 3589 - DNA, 14 bp, synthetic construct
  source 1..14: mol_type = other DNA
tgagatattatcta

SEQ ID NO: 3590 - DNA, 14 bp, synthetic construct
  source 1..14: mol_type = other DNA
tagataatatctcc

SEQ ID NO: 3591 - DNA, 14 bp, synthetic construct
  source 1..14: mol_type = other DNA
ggagatattatcta

SEQ ID NO: 3592 - DNA, 14 bp, synthetic construct
  source 1..14: mol_type = other DNA
tagataatatctct

SEQ ID NO: 3593 - DNA, 14 bp, synthetic construct
  source 1..14: mol_type = other DNA
agagatattatcta

SEQ ID NO: 3594 - DNA, 14 bp, synthetic construct
  source 1..14: mol_type = other DNA
tagataatatctga

SEQ ID NO: 3595 - DNA, 14 bp, synthetic construct
  source 1..14: mol_type = other DNA
tcagatattatcta

SEQ ID NO: 3596 - DNA, 14 bp, synthetic construct
  source 1..14: mol_type = other DNA
tagataatatctgc

SEQ ID NO: 3597 - DNA, 14 bp, synthetic construct
  source 1..14: mol_type = other DNA
gcagatattatcta

SEQ ID NO: 3598 - DNA, 14 bp, synthetic construct
  source 1..14: mol_type = other DNA
tagataatatctgt

SEQ ID NO: 3599 - DNA, 14 bp, synthetic construct
  source 1..14: mol_type = other DNA
acagatattatcta

SEQ ID NO: 3600 - DNA, 14 bp, synthetic construct
  source 1..14: mol_type = other DNA
tagatatcatctaa

SEQ ID NO: 3601 - DNA, 14 bp, synthetic construct
  source 1..14: mol_type = other DNA
ttagatgatatcta

SEQ ID NO: 3602 - DNA, 14 bp, synthetic construct
  source 1..14: mol_type = other DNA
tagatatcatctac

SEQ ID NO: 3603 - DNA, 14 bp, synthetic construct
  source 1..14: mol_type = other DNA
gtagatgatatcta

SEQ ID NO: 3604 - DNA, 14 bp, synthetic construct
  source 1..14: mol_type = other DNA
tagatatcatctat

SEQ ID NO: 3605 - DNA, 14 bp, synthetic construct
  source 1..14: mol_type = other DNA
atagatgatatcta

SEQ ID NO: 3606 - DNA, 14 bp, synthetic construct
  source 1..14: mol_type = other DNA
tagatatcatctca

SEQ ID NO: 3607 - DNA, 14 bp, synthetic construct
  source 1..14: mol_type = other DNA
tgagatgatatcta

SEQ ID NO: 3608 - DNA, 14 bp, synthetic construct
  source 1..14: mol_type = other DNA
tagatatcatctcc

SEQ ID NO: 3609 - DNA, 14 bp, synthetic construct
  source 1..14: mol_type = other DNA
ggagatgatatcta

SEQ ID NO: 3610 - DNA, 14 bp, synthetic construct
  source 1..14: mol_type = other DNA
tagatatcatctct

SEQ ID NO: 3611 - DNA, 14 bp, synthetic construct
  source 1..14: mol_type = other DNA
agagatgatatcta

SEQ ID NO: 3612 - DNA, 14 bp, synthetic construct
  source 1..14: mol_type = other DNA
tagatatcatctga

SEQ ID NO: 3613 - DNA, 14 bp, synthetic construct
  source 1..14: mol_type = other DNA
tcagatgatatcta

SEQ ID NO: 3614 - DNA, 14 bp, synthetic construct
  source 1..14: mol_type = other DNA
tagatatcatctgc

SEQ ID NO: 3615 - DNA, 14 bp, synthetic construct
  source 1..14: mol_type = other DNA
gcagatgatatcta

SEQ ID NO: 3616 - DNA, 14 bp, synthetic construct
  source 1..14: mol_type = other DNA
tagatatcatctgt

SEQ ID NO: 3617 - DNA, 14 bp, synthetic construct
  source 1..14: mol_type = other DNA
acagatgatatcta

SEQ ID NO: 3618 - DNA, 14 bp, synthetic construct
  source 1..14: mol_type = other DNA
tagatattatctaa

SEQ ID NO: 3619 - DNA, 14 bp, synthetic construct
  source 1..14: mol_type = other DNA
ttagataatatcta

SEQ ID NO: 3620 - DNA, 14 bp, synthetic construct
  source 1..14: mol_type = other DNA
tagatattatctac

SEQ ID NO: 3621 - DNA, 14 bp, synthetic construct
  source 1..14: mol_type = other DNA
gtagataatatcta

SEQ ID NO: 3622 - DNA, 14 bp, synthetic construct
  source 1..14: mol_type = other DNA
tagatattatctat

SEQ ID NO: 3623 - DNA, 14 bp, synthetic construct
  source 1..14: mol_type = other DNA
atagataatatcta

SEQ ID NO: 3624 - DNA, 14 bp, synthetic construct
  source 1..14: mol_type = other DNA
tagatattatctca

SEQ ID NO: 3625 - DNA, 14 bp, synthetic construct
  source 1..14: mol_type = other DNA
tgagataatatcta

SEQ ID NO: 3626 - DNA, 14 bp, synthetic construct
  source 1..14: mol_type = other DNA
tagatattatctcc

SEQ ID NO: 3627 - DNA, 14 bp, synthetic construct
  source 1..14: mol_type = other DNA
ggagataatatcta

SEQ ID NO: 3628 - DNA, 14 bp, synthetic construct
  source 1..14: mol_type = other DNA
tagatattatctct

SEQ ID NO: 3629 - DNA, 14 bp, synthetic construct
  source 1..14: mol_type = other DNA
agagataatatcta

SEQ ID NO: 3630 - DNA, 14 bp, synthetic construct
  source 1..14: mol_type = other DNA
tagatattatctga

SEQ ID NO: 3631 - DNA, 14 bp, synthetic construct
  source 1..14: mol_type = other DNA
tcagataatatcta

SEQ ID NO: 3632 - DNA, 14 bp, synthetic construct
  source 1..14: mol_type = other DNA
tagatattatctgc

SEQ ID NO: 3633 - DNA, 14 bp, synthetic construct
  source 1..14: mol_type = other DNA
gcagataatatcta

SEQ ID NO: 3634 - DNA, 14 bp, synthetic construct
  source 1..14: mol_type = other DNA
tagatattatctgt

SEQ ID NO: 3635 - DNA, 14 bp, synthetic construct
  source 1..14: mol_type = other DNA
acagataatatcta

SEQ ID NO: 3636-3641 - skipped (6 entries)

SEQ ID NO: 3642 - DNA, 13 bp, synthetic construct
  source 1..13: mol_type = other DNA
ctgtgcatttttt

SEQ ID NO: 3643 - DNA, 13 bp, synthetic construct
  source 1..13: mol_type = other DNA
aaaaaatgcacag

SEQ ID NO: 3644 - DNA, 13 bp, synthetic construct
  source 1..13: mol_type = other DNA
ttgtgcatttttt

SEQ ID NO: 3645 - DNA, 13 bp, synthetic construct
  source 1..13: mol_type = other DNA
aaaaaatgcacaa

SEQ ID NO: 3646 - DNA, 14 bp, synthetic construct
  source 1..14: mol_type = other DNA
ccgaaaccgaaacc

SEQ ID NO: 3647 - DNA, 14 bp, synthetic construct
  source 1..14: mol_type = other DNA
ggtttcggtttcgg

SEQ ID NO: 3648 - DNA, 14 bp, synthetic construct
  source 1..14: mol_type = other DNA
ccgaaaccgaaact

SEQ ID NO: 3649 - DNA, 14 bp, synthetic construct
  source 1..14: mol_type = other DNA
agtttcggtttcgg

SEQ ID NO: 3650 - DNA, 11 bp, synthetic construct
  source 1..11: mol_type = other DNA
ggtcacgtgag

SEQ ID NO: 3651 - DNA, 11 bp, synthetic construct
  source 1..11: mol_type = other DNA
ctcacgtgacc

SEQ ID NO: 3652 - DNA, 11 bp, synthetic construct
  source 1..11: mol_type = other DNA
ggtcacgtgac

SEQ ID NO: 3653 - DNA, 11 bp, synthetic construct
  source 1..11: mol_type = other DNA
gtcacgtgacc

SEQ ID NO: 3654 - DNA, 11 bp, synthetic construct
  source 1..11: mol_type = other DNA
ggtcacgtggg

SEQ ID NO: 3655 - DNA, 11 bp, synthetic construct
  source 1..11: mol_type = other DNA
cccacgtgacc

SEQ ID NO: 3656 - DNA, 11 bp, synthetic construct
  source 1..11: mol_type = other DNA
ggtcacgtggc

SEQ ID NO: 3657 - DNA, 11 bp, synthetic construct
  source 1..11: mol_type = other DNA
gccacgtgacc

SEQ ID NO: 3658 - DNA, 10 bp, synthetic construct
  source 1..10: mol_type = other DNA
atttcccagg

SEQ ID NO: 3659 - DNA, 10 bp, synthetic construct
  source 1..10: mol_type = other DNA
cctgggaaat

SEQ ID NO: 3660 - DNA, 10 bp, synthetic construct
  source 1..10: mol_type = other DNA
atttcccacg

SEQ ID NO: 3661 - DNA, 10 bp, synthetic construct
  source 1..10: mol_type = other DNA
cgtgggaaat

SEQ ID NO: 3662 - DNA, 10 bp, synthetic construct
  source 1..10: mol_type = other DNA
ctttcccagg

SEQ ID NO: 3663 - DNA, 10 bp, synthetic construct
  source 1..10: mol_type = other DNA
cctgggaaag

SEQ ID NO: 3664 - DNA, 10 bp, synthetic construct
  source 1..10: mol_type = other DNA
ctttcccacg

SEQ ID NO: 3665 - DNA, 10 bp, synthetic construct
  source 1..10: mol_type = other DNA
cgtgggaaag

SEQ ID NO: 3666 - DNA, 10 bp, synthetic construct
  source 1..10: mol_type = other DNA
ttttcccagg

SEQ ID NO: 3667 - DNA, 10 bp, synthetic construct
  source 1..10: mol_type = other DNA
cctgggaaaa

SEQ ID NO: 3668 - DNA, 10 bp, synthetic construct
  source 1..10: mol_type = other DNA
ttttcccacg

SEQ ID NO: 3669 - DNA, 10 bp, synthetic construct
  source 1..10: mol_type = other DNA
cgtgggaaaa

SEQ ID NO: 3670 - DNA, 21 bp, synthetic construct
  source 1..21: mol_type = other DNA
gccaattcccatggtgtaaat

SEQ ID NO: 3671 - DNA, 21 bp, synthetic construct
  source 1..21: mol_type = other DNA
atttacaccatgggaattggc

SEQ ID NO: 3672 - DNA, 21 bp, synthetic construct
  source 1..21: mol_type = other DNA
gccaattcccgtggtgtaaat

SEQ ID NO: 3673 - DNA, 21 bp, synthetic construct
  source 1..21: mol_type = other DNA
atttacaccacgggaattggc

SEQ ID NO: 3674 - DNA, 21 bp, synthetic construct
  source 1..21: mol_type = other DNA
gccaattcctatggtgtaaat

SEQ ID NO: 3675 - DNA, 21 bp, synthetic construct
  source 1..21: mol_type = other DNA
atttacaccataggaattggc

SEQ ID NO: 3676 - DNA, 21 bp, synthetic construct
  source 1..21: mol_type = other DNA
gccaattcctgtggtgtaaat

SEQ ID NO: 3677 - DNA, 21 bp, synthetic construct
  source 1..21: mol_type = other DNA
atttacaccacaggaattggc

SEQ ID NO: 3678 - DNA, 21 bp, synthetic construct
  source 1..21: mol_type = other DNA
gccaatttccatggtgtaaat

SEQ ID NO: 3679 - DNA, 21 bp, synthetic construct
  source 1..21: mol_type = other DNA
atttacaccatggaaattggc

SEQ ID NO: 3680 - DNA, 21 bp, synthetic construct
  source 1..21: mol_type = other DNA
gccaatttccgtggtgtaaat

SEQ ID NO: 3681 - DNA, 21 bp, synthetic construct
  source 1..21: mol_type = other DNA
atttacaccacggaaattggc

SEQ ID NO: 3682 - DNA, 21 bp, synthetic construct
  source 1..21: mol_type = other DNA
gccaatttctatggtgtaaat

SEQ ID NO: 3683 - DNA, 21 bp, synthetic construct
  source 1..21: mol_type = other DNA
atttacaccatagaaattggc

SEQ ID NO: 3684 - DNA, 21 bp, synthetic construct
  source 1..21: mol_type = other DNA
gccaatttctgtggtgtaaat

SEQ ID NO: 3685 - DNA, 21 bp, synthetic construct
  source 1..21: mol_type = other DNA
atttacaccacagaaattggc

SEQ ID NO: 3686 - DNA, 12 bp, synthetic construct
  source 1..12: mol_type = other DNA
agtttcagtttc

SEQ ID NO: 3687 - DNA, 12 bp, synthetic construct
  source 1..12: mol_type = other DNA
gaaactgaaact

SEQ ID NO: 3688 - DNA, 12 bp, synthetic construct
  source 1..12: mol_type = other DNA
agtttcattttc

SEQ ID NO: 3689 - DNA, 12 bp, synthetic construct
  source 1..12: mol_type = other DNA
gaaaatgaaact

SEQ ID NO: 3690-3691 - skipped (2 entries)

SEQ ID NO: 3692 - DNA, 12 bp, synthetic construct
  source 1..12: mol_type = other DNA
agggggcggggc

SEQ ID NO: 3693 - DNA, 12 bp, synthetic construct
  source 1..12: mol_type = other DNA
gccccgccccct

SEQ ID NO: 3694 - DNA, 12 bp, synthetic construct
  source 1..12: mol_type = other DNA
agggggcgtggc

SEQ ID NO: 3695 - DNA, 12 bp, synthetic construct
  source 1..12: mol_type = other DNA
gccacgccccct

SEQ ID NO: 3696 - DNA, 12 bp, synthetic construct
  source 1..12: mol_type = other DNA
agtgggcggggc

SEQ ID NO: 3697 - DNA, 12 bp, synthetic construct
  source 1..12: mol_type = other DNA
gccccgcccact

SEQ ID NO: 3698 - DNA, 12 bp, synthetic construct
  source 1..12: mol_type = other DNA
agtgggcgtggc

SEQ ID NO: 3699 - DNA, 12 bp, synthetic construct
  source 1..12: mol_type = other DNA
gccacgcccact

SEQ ID NO: 3700 - DNA, 12 bp, synthetic construct
  source 1..12: mol_type = other DNA
ggggggcggggc

SEQ ID NO: 3701 - DNA, 12 bp, synthetic construct
  source 1..12: mol_type = other DNA
gccccgcccccc

SEQ ID NO: 3702 - DNA, 12 bp, synthetic construct
  source 1..12: mol_type = other DNA
ggggggcgtggc

SEQ ID NO: 3703 - DNA, 12 bp, synthetic construct
  source 1..12: mol_type = other DNA
gccacgcccccc

SEQ ID NO: 3704 - DNA, 12 bp, synthetic construct
  source 1..12: mol_type = other DNA
ggtgggcggggc

SEQ ID NO: 3705 - DNA, 12 bp, synthetic construct
  source 1..12: mol_type = other DNA
gccccgcccacc

SEQ ID NO: 3706 - DNA, 12 bp, synthetic construct
  source 1..12: mol_type = other DNA
ggtgggcgtggc

SEQ ID NO: 3707 - DNA, 12 bp, synthetic construct
  source 1..12: mol_type = other DNA
gccacgcccacc

SEQ ID NO: 3708-3763 - skipped (56 entries)

SEQ ID NO: 3764 - DNA, 12 bp, synthetic construct
  source 1..12: mol_type = other DNA
aggggcgtggcc

SEQ ID NO: 3765 - DNA, 12 bp, synthetic construct
  source 1..12: mol_type = other DNA
ggccacgcccct

SEQ ID NO: 3766 - DNA, 12 bp, synthetic construct
  source 1..12: mol_type = other DNA
aggggtgtggcc

SEQ ID NO: 3767 - DNA, 12 bp, synthetic construct
  source 1..12: mol_type = other DNA
ggccacacccct

SEQ ID NO: 3768 - DNA, 12 bp, synthetic construct
  source 1..12: mol_type = other DNA
atgggcgtggcc

SEQ ID NO: 3769 - DNA, 12 bp, synthetic construct
  source 1..12: mol_type = other DNA
ggccacgcccat

SEQ ID NO: 3770 - DNA, 12 bp, synthetic construct
  source 1..12: mol_type = other DNA
atgggtgtggcc

SEQ ID NO: 3771 - DNA, 12 bp, synthetic construct
  source 1..12: mol_type = other DNA
ggccacacccat

SEQ ID NO: 3772 - DNA, 12 bp, synthetic construct
  source 1..12: mol_type = other DNA
cggggcgtggcc

SEQ ID NO: 3773 - DNA, 12 bp, synthetic construct
  source 1..12: mol_type = other DNA
ggccacgccccg

SEQ ID NO: 3774 - DNA, 12 bp, synthetic construct
  source 1..12: mol_type = other DNA
cggggtgtggcc

SEQ ID NO: 3775 - DNA, 12 bp, synthetic construct
  source 1..12: mol_type = other DNA
ggccacaccccg

SEQ ID NO: 3776 - DNA, 12 bp, synthetic construct
  source 1..12: mol_type = other DNA
ctgggcgtggcc

SEQ ID NO: 3777 - DNA, 12 bp, synthetic construct
  source 1..12: mol_type = other DNA
ggccacgcccag

SEQ ID NO: 3778 - DNA, 12 bp, synthetic construct
  source 1..12: mol_type = other DNA
ctgggtgtggcc

SEQ ID NO: 3779 - DNA, 12 bp, synthetic construct
  source 1..12: mol_type = other DNA
ggccacacccag

SEQ ID NO: 3780 - DNA, 10 bp, synthetic construct
  source 1..10: mol_type = other DNA
atcatgtgac

SEQ ID NO: 3781 - DNA, 10 bp, synthetic construct
  source 1..10: mol_type = other DNA
gtcacatgat

SEQ ID NO: 3782 - DNA, 10 bp, synthetic construct
  source 1..10: mol_type = other DNA
gtcatgtgac

SEQ ID NO: 3783 - DNA, 10 bp, synthetic construct
  source 1..10: mol_type = other DNA
gtcacatgac

SEQ ID NO: 3784 - DNA, 12 bp, synthetic construct
  source 1..12: mol_type = other DNA
caattccgctca

SEQ ID NO: 3785 - DNA, 12 bp, synthetic construct
  source 1..12: mol_type = other DNA
tgagcggaattg

SEQ ID NO: 3786 - DNA, 12 bp, synthetic construct
  source 1..12: mol_type = other DNA
caattccgctcc

SEQ ID NO: 3787 - DNA, 12 bp, synthetic construct
  source 1..12: mol_type = other DNA
ggagcggaattg

SEQ ID NO: 3788 - DNA, 10 bp, synthetic construct
  source 1..10: mol_type = other DNA
aagcggaagt

SEQ ID NO: 3789 - DNA, 10 bp, synthetic construct
  source 1..10: mol_type = other DNA
acttccgctt

SEQ ID NO: 3790 - DNA, 10 bp, synthetic construct
  source 1..10: mol_type = other DNA
aaccggaagt

SEQ ID NO: 3791 - DNA, 10 bp, synthetic construct
  source 1..10: mol_type = other DNA
acttccggtt

SEQ ID NO: 3792 - DNA, 15 bp, synthetic construct
  source 1..15: mol_type = other DNA
atagggcaaaggtca

SEQ ID NO: 3793 - DNA, 15 bp, synthetic construct
  source 1..15: mol_type = other DNA
tgacctttgccctat

SEQ ID NO: 3794 - DNA, 15 bp, synthetic construct
  source 1..15: mol_type = other DNA
ataggtcaaaggtca

SEQ ID NO: 3795 - DNA, 15 bp, synthetic construct
  source 1..15: mol_type = other DNA
tgacctttgacctat

SEQ ID NO: 3796 - DNA, 15 bp, synthetic construct
  source 1..15: mol_type = other DNA
ctagggcaaaggtca

SEQ ID NO: 3797 - DNA, 15 bp, synthetic construct
  source 1..15: mol_type = other DNA
tgacctttgccctag

SEQ ID NO: 3798 - DNA, 15 bp, synthetic construct
  source 1..15: mol_type = other DNA
ctaggtcaaaggtca

SEQ ID NO: 3799 - DNA, 15 bp, synthetic construct
  source 1..15: mol_type = other DNA
tgacctttgacctag

SEQ ID NO: 3800 - DNA, 15 bp, synthetic construct
  source 1..15: mol_type = other DNA
gtagggcaaaggtca

SEQ ID NO: 3801 - DNA, 15 bp, synthetic construct
  source 1..15: mol_type = other DNA
tgacctttgccctac

SEQ ID NO: 3802 - DNA, 15 bp, synthetic construct
  source 1..15: mol_type = other DNA
gtaggtcaaaggtca

SEQ ID NO: 3803 - DNA, 15 bp, synthetic construct
  source 1..15: mol_type = other DNA
tgacctttgacctac

SEQ ID NO: 3804 - DNA, 10 bp, synthetic construct
  source 1..10: mol_type = other DNA
accacatgac

SEQ ID NO: 3805 - DNA, 10 bp, synthetic construct
  source 1..10: mol_type = other DNA
gtcatgtggt

SEQ ID NO: 3806 - DNA, 10 bp, synthetic construct
  source 1..10: mol_type = other DNA
accacatgat

SEQ ID NO: 3807 - DNA, 10 bp, synthetic construct
  source 1..10: mol_type = other DNA
atcatgtggt

SEQ ID NO: 3808 - DNA, 10 bp, synthetic construct
  source 1..10: mol_type = other DNA
accacgtgac

SEQ ID NO: 3809 - DNA, 10 bp, synthetic construct
  source 1..10: mol_type = other DNA
gtcacgtggt

SEQ ID NO: 3810 - DNA, 10 bp, synthetic construct
  source 1..10: mol_type = other DNA
accacgtgat

SEQ ID NO: 3811 - DNA, 10 bp, synthetic construct
  source 1..10: mol_type = other DNA
atcacgtggt

SEQ ID NO: 3812 - DNA, 10 bp, synthetic construct
  source 1..10: mol_type = other DNA
gccacatgac

SEQ ID NO: 3813 - DNA, 10 bp, synthetic construct
  source 1..10: mol_type = other DNA
gtcatgtggc

SEQ ID NO: 3814 - DNA, 10 bp, synthetic construct
  source 1..10: mol_type = other DNA
gccacatgat

SEQ ID NO: 3815 - DNA, 10 bp, synthetic construct
  source 1..10: mol_type = other DNA
atcatgtggc

SEQ ID NO: 3816 - DNA, 10 bp, synthetic construct
  source 1..10: mol_type = other DNA
gccacgtgac

SEQ ID NO: 3817 - DNA, 10 bp, synthetic construct
  source 1..10: mol_type = other DNA
gtcacgtggc

SEQ ID NO: 3818 - DNA, 10 bp, synthetic construct
  source 1..10: mol_type = other DNA
gccacgtgat

SEQ ID NO: 3819 - DNA, 10 bp, synthetic construct
  source 1..10: mol_type = other DNA
atcacgtggc

SEQ ID NO: 3820 - DNA, 10 bp, synthetic construct
  source 1..10: mol_type = other DNA
aactaggtca

SEQ ID NO: 3821 - DNA, 10 bp, synthetic construct
  source 1..10: mol_type = other DNA
tgacctagtt

SEQ ID NO: 3822 - DNA, 10 bp, synthetic construct
  source 1..10: mol_type = other DNA
aattaggtca

SEQ ID NO: 3823 - DNA, 10 bp, synthetic construct
  source 1..10: mol_type = other DNA
tgacctaatt

SEQ ID NO: 3824-3847 - skipped (24 entries)

SEQ ID NO: 3848 - DNA, 12 bp, synthetic construct
  source 1..12: mol_type = other DNA
ggccaaaggtca

SEQ ID NO: 3849 - DNA, 12 bp, synthetic construct
  source 1..12: mol_type = other DNA
tgacctttggcc

SEQ ID NO: 3850 - DNA, 12 bp, synthetic construct
  source 1..12: mol_type = other DNA
ggccagaggtca

SEQ ID NO: 3851 - DNA, 12 bp, synthetic construct
  source 1..12: mol_type = other DNA
tgacctctggcc

SEQ ID NO: 3852 - DNA, 12 bp, synthetic construct
  source 1..12: mol_type = other DNA
gggcaaaggtca

SEQ ID NO: 3853 - DNA, 12 bp, synthetic construct
  source 1..12: mol_type = other DNA
tgacctttgccc

SEQ ID NO: 3854 - DNA, 12 bp, synthetic construct
  source 1..12: mol_type = other DNA
gggcagaggtca

SEQ ID NO: 3855 - DNA, 12 bp, synthetic construct
  source 1..12: mol_type = other DNA
tgacctctgccc

SEQ ID NO: 3856 - DNA, 12 bp, synthetic construct
  source 1..12: mol_type = other DNA
ggtcaaaggtca

SEQ ID NO: 3857 - DNA, 12 bp, synthetic construct
  source 1..12: mol_type = other DNA
tgacctttgacc

SEQ ID NO: 3858 - DNA, 12 bp, synthetic construct
  source 1..12: mol_type = other DNA
ggtcagaggtca

SEQ ID NO: 3859 - DNA, 12 bp, synthetic construct
  source 1..12: mol_type = other DNA
tgacctctgacc

SEQ ID NO: 3860 - DNA, 12 bp, synthetic construct
  source 1..12: mol_type = other DNA
gtccaaaggtca

SEQ ID NO: 3861 - DNA, 12 bp, synthetic construct
  source 1..12: mol_type = other DNA
tgacctttggac

SEQ ID NO: 3862 - DNA, 12 bp, synthetic construct
  source 1..12: mol_type = other DNA
gtccagaggtca

SEQ ID NO: 3863 - DNA, 12 bp, synthetic construct
  source 1..12: mol_type = other DNA
tgacctctggac

SEQ ID NO: 3864 - DNA, 12 bp, synthetic construct
  source 1..12: mol_type = other DNA
gtgcaaaggtca

SEQ ID NO: 3865 - DNA, 12 bp, synthetic construct
  source 1..12: mol_type = other DNA
tgacctttgcac

SEQ ID NO: 3866 - DNA, 12 bp, synthetic construct
  source 1..12: mol_type = other DNA
gtgcagaggtca

SEQ ID NO: 3867 - DNA, 12 bp, synthetic construct
  source 1..12: mol_type = other DNA
tgacctctgcac

SEQ ID NO: 3868 - DNA, 12 bp, synthetic construct
  source 1..12: mol_type = other DNA
gttcaaaggtca

SEQ ID NO: 3869 - DNA, 12 bp, synthetic construct
  source 1..12: mol_type = other DNA
tgacctttgaac

SEQ ID NO: 3870 - DNA, 12 bp, synthetic construct
  source 1..12: mol_type = other DNA
gttcagaggtca

SEQ ID NO: 3871 - DNA, 12 bp, synthetic construct
  source 1..12: mol_type = other DNA
tgacctctgaac

SEQ ID NO: 3872 - DNA, 18 bp, synthetic construct
  source 1..18: mol_type = other DNA
agctagcccctgcctacc

SEQ ID NO: 3873 - DNA, 18 bp, synthetic construct
  source 1..18: mol_type = other DNA
ggtaggcaggggctagct

SEQ ID NO: 3874 - DNA, 18 bp, synthetic construct
  source 1..18: mol_type = other DNA
agctagccccttcctacc

SEQ ID NO: 3875 - DNA, 18 bp, synthetic construct
  source 1..18: mol_type = other DNA
ggtaggaaggggctagct

SEQ ID NO: 3876 - DNA, 18 bp, synthetic construct
  source 1..18: mol_type = other DNA
atctagcccctgcctacc

SEQ ID NO: 3877 - DNA, 18 bp, synthetic construct
  source 1..18: mol_type = other DNA
ggtaggcaggggctagat

SEQ ID NO: 3878 - DNA, 18 bp, synthetic construct
  source 1..18: mol_type = other DNA
atctagccccttcctacc

SEQ ID NO: 3879 - DNA, 18 bp, synthetic construct
  source 1..18: mol_type = other DNA
ggtaggaaggggctagat

SEQ ID NO: 3880 - DNA, 18 bp, synthetic construct
  source 1..18: mol_type = other DNA
ggctagcccctgcctacc

SEQ ID NO: 3881 - DNA, 18 bp, synthetic construct
  source 1..18: mol_type = other DNA
ggtaggcaggggctagcc

SEQ ID NO: 3882 - DNA, 18 bp, synthetic construct
  source 1..18: mol_type = other DNA
ggctagccccttcctacc

SEQ ID NO: 3883 - DNA, 18 bp, synthetic construct
  source 1..18: mol_type = other DNA
ggtaggaaggggctagcc

SEQ ID NO: 3884 - DNA, 18 bp, synthetic construct
  source 1..18: mol_type = other DNA
gtctagcccctgcctacc

SEQ ID NO: 3885 - DNA, 18 bp, synthetic construct
  source 1..18: mol_type = other DNA
ggtaggcaggggctagac

SEQ ID NO: 3886 - DNA, 18 bp, synthetic construct
  source 1..18: mol_type = other DNA
gtctagccccttcctacc

SEQ ID NO: 3887 - DNA, 18 bp, synthetic construct
  source 1..18: mol_type = other DNA
ggtaggaaggggctagac

SEQ ID NO: 3888 - DNA, 13 bp, synthetic construct
  source 1..13: mol_type = other DNA
aaactaggtcaaa

SEQ ID NO: 3889 - DNA, 13 bp, synthetic construct
  source 1..13: mol_type = other DNA
tttgacctagttt

SEQ ID NO: 3890 - DNA, 13 bp, synthetic construct
  source 1..13: mol_type = other DNA
aaactaggtcaag

SEQ ID NO: 3891 - DNA, 13 bp, synthetic construct
  source 1..13: mol_type = other DNA
cttgacctagttt

SEQ ID NO: 3892 - DNA, 13 bp, synthetic construct
  source 1..13: mol_type = other DNA
aaactaggtcaat

SEQ ID NO: 3893 - DNA, 13 bp, synthetic construct
  source 1..13: mol_type = other DNA
attgacctagttt

SEQ ID NO: 3894 - DNA, 13 bp, synthetic construct
  source 1..13: mol_type = other DNA
aaactaggtcaga

SEQ ID NO: 3895 - DNA, 13 bp, synthetic construct
  source 1..13: mol_type = other DNA
tctgacctagttt

SEQ ID NO: 3896 - DNA, 13 bp, synthetic construct
  source 1..13: mol_type = other DNA
aaactaggtcagg

SEQ ID NO: 3897 - DNA, 13 bp, synthetic construct
  source 1..13: mol_type = other DNA
cctgacctagttt

SEQ ID NO: 3898 - DNA, 13 bp, synthetic construct
  source 1..13: mol_type = other DNA
aaactaggtcagt

SEQ ID NO: 3899 - DNA, 13 bp, synthetic construct
  source 1..13: mol_type = other DNA
actgacctagttt

SEQ ID NO: 3900 - DNA, 13 bp, synthetic construct
  source 1..13: mol_type = other DNA
aatctaggtcaaa

SEQ ID NO: 3901 - DNA, 13 bp, synthetic construct
  source 1..13: mol_type = other DNA
tttgacctagatt

SEQ ID NO: 3902 - DNA, 13 bp, synthetic construct
  source 1..13: mol_type = other DNA
aatctaggtcaag

SEQ ID NO: 3903 - DNA, 13 bp, synthetic construct
  source 1..13: mol_type = other DNA
cttgacctagatt

SEQ ID NO: 3904 - DNA, 13 bp, synthetic construct
  source 1..13: mol_type = other DNA
aatctaggtcaat

SEQ ID NO: 3905 - DNA, 13 bp, synthetic construct
  source 1..13: mol_type = other DNA
attgacctagatt

SEQ ID NO: 3906 - DNA, 13 bp, synthetic construct
  source 1..13: mol_type = other DNA
aatctaggtcaga

SEQ ID NO: 3907 - DNA, 13 bp, synthetic construct
  source 1..13: mol_type = other DNA
tctgacctagatt

SEQ ID NO: 3908 - DNA, 13 bp, synthetic construct
  source 1..13: mol_type = other DNA
aatctaggtcagg

SEQ ID NO: 3909 - DNA, 13 bp, synthetic construct
  source 1..13: mol_type = other DNA
cctgacctagatt

SEQ ID NO: 3910 - DNA, 13 bp, synthetic construct
  source 1..13: mol_type = other DNA
aatctaggtcagt

SEQ ID NO: 3911 - DNA, 13 bp, synthetic construct
  source 1..13: mol_type = other DNA
actgacctagatt

SEQ ID NO: 3912 - DNA, 14 bp, synthetic construct
  source 1..14: mol_type = other DNA
ggacataacgtgcc

SEQ ID NO: 3913 - DNA, 14 bp, synthetic construct
  source 1..14: mol_type = other DNA
ggcacgttatgtcc

SEQ ID NO: 3914 - DNA, 14 bp, synthetic construct
  source 1..14: mol_type = other DNA
ggacataacgtgct

SEQ ID NO: 3915 - DNA, 14 bp, synthetic construct
  source 1..14: mol_type = other DNA
agcacgttatgtcc

SEQ ID NO: 3916 - DNA, 14 bp, synthetic construct
  source 1..14: mol_type = other DNA
ggacataatgtgcc

SEQ ID NO: 3917 - DNA, 14 bp, synthetic construct
  source 1..14: mol_type = other DNA
ggcacattatgtcc

SEQ ID NO: 3918 - DNA, 14 bp, synthetic construct
  source 1..14: mol_type = other DNA
ggacataatgtgct

SEQ ID NO: 3919 - DNA, 14 bp, synthetic construct
  source 1..14: mol_type = other DNA
agcacattatgtcc

SEQ ID NO: 3920 - DNA, 12 bp, synthetic construct
  source 1..12: mol_type = other DNA
ggtgctgacagg

SEQ ID NO: 3921 - DNA, 12 bp, synthetic construct
  source 1..12: mol_type = other DNA
cctgtcagcacc

SEQ ID NO: 3922 - DNA, 12 bp, synthetic construct
  source 1..12: mol_type = other DNA
ggtgctgacagc

SEQ ID NO: 3923 - DNA, 12 bp, synthetic construct
  source 1..12: mol_type = other DNA
gctgtcagcacc

SEQ ID NO: 3924 - DNA, 12 bp, synthetic construct
  source 1..12: mol_type = other DNA
ggtgttgacagg

SEQ ID NO: 3925 - DNA, 12 bp, synthetic construct
  source 1..12: mol_type = other DNA
cctgtcaacacc

SEQ ID NO: 3926 - DNA, 12 bp, synthetic construct
  source 1..12: mol_type = other DNA
ggtgttgacagc

SEQ ID NO: 3927 - DNA, 12 bp, synthetic construct
  source 1..12: mol_type = other DNA
gctgtcaacacc

SEQ ID NO: 3928 - DNA, 12 bp, synthetic construct
  source 1..12: mol_type = other DNA
ttaattgtttgt

SEQ ID NO: 3929 - DNA, 12 bp, synthetic construct
  source 1..12: mol_type = other DNA
acaaacaattaa

SEQ ID NO: 3930 - DNA, 12 bp, synthetic construct
  source 1..12: mol_type = other DNA
ttaattgttttt

SEQ ID NO: 3931 - DNA, 12 bp, synthetic construct
  source 1..12: mol_type = other DNA
aaaaacaattaa

SEQ ID NO: 3932 - DNA, 15 bp, synthetic construct
  source 1..15: mol_type = other DNA
accccactcctggta

SEQ ID NO: 3933 - DNA, 15 bp, synthetic construct
  source 1..15: mol_type = other DNA
taccaggagtggggt

SEQ ID NO: 3934 - DNA, 15 bp, synthetic construct
  source 1..15: mol_type = other DNA
accccactcctggtc

SEQ ID NO: 3935 - DNA, 15 bp, synthetic construct
  source 1..15: mol_type = other DNA
gaccaggagtggggt

SEQ ID NO: 3936 - DNA, 13 bp, synthetic construct
  source 1..13: mol_type = other DNA
cgaaaccgaaacc

SEQ ID NO: 3937 - DNA, 13 bp, synthetic construct
  source 1..13: mol_type = other DNA
ggtttcggtttcg

SEQ ID NO: 3938 - DNA, 13 bp, synthetic construct
  source 1..13: mol_type = other DNA
cgaaaccgaaact

SEQ ID NO: 3939 - DNA, 13 bp, synthetic construct
  source 1..13: mol_type = other DNA
agtttcggtttcg

SEQ ID NO: 3940-3951 - skipped (12 entries)

SEQ ID NO: 3952 - DNA, 11 bp, synthetic construct
  source 1..11: mol_type = other DNA
aatgacgtcat

SEQ ID NO: 3953 - DNA, 11 bp, synthetic construct
  source 1..11: mol_type = other DNA
atgacgtcatt

SEQ ID NO: 3954 - DNA, 11 bp, synthetic construct
  source 1..11: mol_type = other DNA
agtgacgtcat

SEQ ID NO: 3955 - DNA, 11 bp, synthetic construct
  source 1..11: mol_type = other DNA
atgacgtcact

SEQ ID NO: 3956 - DNA, 11 bp, synthetic construct
  source 1..11: mol_type = other DNA
gatgacgtcat

SEQ ID NO: 3957 - DNA, 11 bp, synthetic construct
  source 1..11: mol_type = other DNA
atgacgtcatc

SEQ ID NO: 3958 - DNA, 11 bp, synthetic construct
  source 1..11: mol_type = other DNA
ggtgacgtcat

SEQ ID NO: 3959 - DNA, 11 bp, synthetic construct
  source 1..11: mol_type = other DNA
atgacgtcacc

SEQ ID NO: 3960-3971 - skipped (12 entries)

SEQ ID NO: 3972 - DNA, 10 bp, synthetic construct
  source 1..10: mol_type = other DNA
accggaagtg

SEQ ID NO: 3973 - DNA, 10 bp, synthetic construct
  source 1..10: mol_type = other DNA
cacttccggt

SEQ ID NO: 3974 - DNA, 10 bp, synthetic construct
  source 1..10: mol_type = other DNA
gccggaagtg

SEQ ID NO: 3975 - DNA, 10 bp, synthetic construct
  source 1..10: mol_type = other DNA
cacttccggc

SEQ ID NO: 3976-3983 - skipped (8 entries)

SEQ ID NO: 3984 - DNA, 10 bp, synthetic construct
  source 1..10: mol_type = other DNA
agcaggaagt

SEQ ID NO: 3985 - DNA, 10 bp, synthetic construct
  source 1..10: mol_type = other DNA
acttcctgct

SEQ ID NO: 3986 - DNA, 10 bp, synthetic construct
  source 1..10: mol_type = other DNA
acatcctggt

SEQ ID NO: 3987 - DNA, 10 bp, synthetic construct
  source 1..10: mol_type = other DNA
accaggatgt

SEQ ID NO: 3988 - DNA, 10 bp, synthetic construct
  source 1..10: mol_type = other DNA
aacaggaagt

SEQ ID NO: 3989 - DNA, 10 bp, synthetic construct
  source 1..10: mol_type = other DNA
acttcctgtt

SEQ ID NO: 3990 - DNA, 10 bp, synthetic construct
  source 1..10: mol_type = other DNA
accaggaagt

SEQ ID NO: 3991 - DNA, 10 bp, synthetic construct
  source 1..10: mol_type = other DNA
acttcctggt

SEQ ID NO: 3992 - DNA, 10 bp, synthetic construct
  source 1..10: mol_type = other DNA
agcaggaagt

SEQ ID NO: 3993 - DNA, 10 bp, synthetic construct
  source 1..10: mol_type = other DNA
acttcctgct

SEQ ID NO: 3994 - DNA, 12 bp, synthetic construct
  source 1..12: mol_type = other DNA
tggtacattcca

SEQ ID NO: 3995 - DNA, 12 bp, synthetic construct
  source 1..12: mol_type = other DNA
tggaatgtacca

SEQ ID NO: 3996 - DNA, 10 bp, synthetic construct
  source 1..10: mol_type = other DNA
gggatattcc

SEQ ID NO: 3997 - DNA, 10 bp, synthetic construct
  source 1..10: mol_type = other DNA
ggaatatccc

SEQ ID NO: 3998 - DNA, 10 bp, synthetic construct
  source 1..10: mol_type = other DNA
gggattttcc

SEQ ID NO: 3999 - DNA, 10 bp, synthetic construct
  source 1..10: mol_type = other DNA
ggaaaatccc

SEQ ID NO: 4000 - DNA, 10 bp, synthetic construct
  source 1..10: mol_type = other DNA
ggggtattcc

SEQ ID NO: 4001 - DNA, 10 bp, synthetic construct
  source 1..10: mol_type = other DNA
ggaatacccc

SEQ ID NO: 4002 - DNA, 10 bp, synthetic construct
  source 1..10: mol_type = other DNA
ggggttttcc

SEQ ID NO: 4003 - DNA, 10 bp, synthetic construct
  source 1..10: mol_type = other DNA
ggaaaacccc

SEQ ID NO: 4004 - DNA, 10 bp, synthetic construct
  source 1..10: mol_type = other DNA
cggatattcc

SEQ ID NO: 4005 - DNA, 10 bp, synthetic construct
  source 1..10: mol_type = other DNA
ggaatatccg

SEQ ID NO: 4006 - DNA, 10 bp, synthetic construct
  source 1..10: mol_type = other DNA
cggattttcc

SEQ ID NO: 4007 - DNA, 10 bp, synthetic construct
  source 1..10: mol_type = other DNA
ggaaaatccg

SEQ ID NO: 4008 - DNA, 10 bp, synthetic construct
  source 1..10: mol_type = other DNA
cgggtattcc

SEQ ID NO: 4009 - DNA, 10 bp, synthetic construct
  source 1..10: mol_type = other DNA
ggaatacccg

SEQ ID NO: 4010 - DNA, 10 bp, synthetic construct
  source 1..10: mol_type = other DNA
cgggttttcc

SEQ ID NO: 4011 - DNA, 10 bp, synthetic construct
  source 1..10: mol_type = other DNA
ggaaaacccg

SEQ ID NO: 4012 - DNA, 18 bp, synthetic construct
  source 1..18: mol_type = other DNA
ctgggcatctgcagcccc

SEQ ID NO: 4013 - DNA, 18 bp, synthetic construct
  source 1..18: mol_type = other DNA
ggggctgcagatgcccag

SEQ ID NO: 4014 - DNA, 18 bp, synthetic construct
  source 1..18: mol_type = other DNA
ctgggcatctgcagccct

SEQ ID NO: 4015 - DNA, 18 bp, synthetic construct
  source 1..18: mol_type = other DNA
agggctgcagatgcccag

SEQ ID NO: 4016 - DNA, 18 bp, synthetic construct
  source 1..18: mol_type = other DNA
ctgggtatctgcagcccc

SEQ ID NO: 4017 - DNA, 18 bp, synthetic construct
  source 1..18: mol_type = other DNA
ggggctgcagatacccag

SEQ ID NO: 4018 - DNA, 18 bp, synthetic construct
  source 1..18: mol_type = other DNA
ctgggtatctgcagccct

SEQ ID NO: 4019 - DNA, 18 bp, synthetic construct
  source 1..18: mol_type = other DNA
agggctgcagatacccag

SEQ ID NO: 4020 - DNA, 18 bp, synthetic construct
  source 1..18: mol_type = other DNA
cttggcatctgcagcccc

SEQ ID NO: 4021 - DNA, 18 bp, synthetic construct
  source 1..18: mol_type = other DNA
ggggctgcagatgccaag

SEQ ID NO: 4022 - DNA, 18 bp, synthetic construct
  source 1..18: mol_type = other DNA
cttggcatctgcagccct

SEQ ID NO: 4023 - DNA, 18 bp, synthetic construct
  source 1..18: mol_type = other DNA
agggctgcagatgccaag

SEQ ID NO: 4024 - DNA, 18 bp, synthetic construct
  source 1..18: mol_type = other DNA
cttggtatctgcagcccc

SEQ ID NO: 4025 - DNA, 18 bp, synthetic construct
  source 1..18: mol_type = other DNA
ggggctgcagataccaag

SEQ ID NO: 4026 - DNA, 18 bp, synthetic construct
  source 1..18: mol_type = other DNA
cttggtatctgcagccct

SEQ ID NO: 4027 - DNA, 18 bp, synthetic construct
  source 1..18: mol_type = other DNA
agggctgcagataccaag

SEQ ID NO: 4028 - DNA, 18 bp, synthetic construct
  source 1..18: mol_type = other DNA
ttgggcatctgcagcccc

SEQ ID NO: 4029 - DNA, 18 bp, synthetic construct
  source 1..18: mol_type = other DNA
ggggctgcagatgcccaa

SEQ ID NO: 4030 - DNA, 18 bp, synthetic construct
  source 1..18: mol_type = other DNA
ttgggcatctgcagccct

SEQ ID NO: 4031 - DNA, 18 bp, synthetic construct
  source 1..18: mol_type = other DNA
agggctgcagatgcccaa

SEQ ID NO: 4032 - DNA, 18 bp, synthetic construct
  source 1..18: mol_type = other DNA
ttgggtatctgcagcccc

SEQ ID NO: 4033 - DNA, 18 bp, synthetic construct
  source 1..18: mol_type = other DNA
ggggctgcagatacccaa

SEQ ID NO: 4034 - DNA, 18 bp, synthetic construct
  source 1..18: mol_type = other DNA
ttgggtatctgcagccct

SEQ ID NO: 4035 - DNA, 18 bp, synthetic construct
  source 1..18: mol_type = other DNA
agggctgcagatacccaa

SEQ ID NO: 4036 - DNA, 18 bp, synthetic construct
  source 1..18: mol_type = other DNA
tttggcatctgcagcccc

SEQ ID NO: 4037 - DNA, 18 bp, synthetic construct
  source 1..18: mol_type = other DNA
ggggctgcagatgccaaa

SEQ ID NO: 4038 - DNA, 18 bp, synthetic construct
  source 1..18: mol_type = other DNA
tttggcatctgcagccct

SEQ ID NO: 4039 - DNA, 18 bp, synthetic construct
  source 1..18: mol_type = other DNA
agggctgcagatgccaaa

SEQ ID NO: 4040 - DNA, 18 bp, synthetic construct
  source 1..18: mol_type = other DNA
tttggtatctgcagcccc

SEQ ID NO: 4041 - DNA, 18 bp, synthetic construct
  source 1..18: mol_type = other DNA
ggggctgcagataccaaa

SEQ ID NO: 4042 - DNA, 18 bp, synthetic construct
  source 1..18: mol_type = other DNA
tttggtatctgcagccct

SEQ ID NO: 4043 - DNA, 18 bp, synthetic construct
  source 1..18: mol_type = other DNA
agggctgcagataccaaa

SEQ ID NO: 4044 - DNA, 21 bp, synthetic construct
  source 1..21: mol_type = other DNA
aatacagccctagactctccc

SEQ ID NO: 4045 - DNA, 21 bp, synthetic construct
  source 1..21: mol_type = other DNA
gggagagtctagggctgtatt

SEQ ID NO: 4046 - DNA, 21 bp, synthetic construct
  source 1..21: mol_type = other DNA
aatacagccctagactctcct

SEQ ID NO: 4047 - DNA, 21 bp, synthetic construct
  source 1..21: mol_type = other DNA
aggagagtctagggctgtatt

SEQ ID NO: 4048 - DNA, 21 bp, synthetic construct
  source 1..21: mol_type = other DNA
aatacagccctatactctccc

SEQ ID NO: 4049 - DNA, 21 bp, synthetic construct
  source 1..21: mol_type = other DNA
gggagagtatagggctgtatt

SEQ ID NO: 4050 - DNA, 21 bp, synthetic construct
  source 1..21: mol_type = other DNA
aatacagccctatactctcct

SEQ ID NO: 4051 - DNA, 21 bp, synthetic construct
  source 1..21: mol_type = other DNA
aggagagtatagggctgtatt

SEQ ID NO: 4052 - DNA, 21 bp, synthetic construct
  source 1..21: mol_type = other DNA
aatccagccctagactctccc

SEQ ID NO: 4053 - DNA, 21 bp, synthetic construct
  source 1..21: mol_type = other DNA
gggagagtctagggctggatt

SEQ ID NO: 4054 - DNA, 21 bp, synthetic construct
  source 1..21: mol_type = other DNA
aatccagccctagactctcct

SEQ ID NO: 4055 - DNA, 21 bp, synthetic construct
  source 1..21: mol_type = other DNA
aggagagtctagggctggatt

SEQ ID NO: 4056 - DNA, 21 bp, synthetic construct
  source 1..21: mol_type = other DNA
aatccagccctatactctccc

SEQ ID NO: 4057 - DNA, 21 bp, synthetic construct
  source 1..21: mol_type = other DNA
gggagagtatagggctggatt

SEQ ID NO: 4058 - DNA, 21 bp, synthetic construct
  source 1..21: mol_type = other DNA
aatccagccctatactctcct

SEQ ID NO: 4059 - DNA, 21 bp, synthetic construct
  source 1..21: mol_type = other DNA
aggagagtatagggctggatt

SEQ ID NO: 4060 - DNA, 21 bp, synthetic construct
  source 1..21: mol_type = other DNA
attacagccctagactctccc

SEQ ID NO: 4061 - DNA, 21 bp, synthetic construct
  source 1..21: mol_type = other DNA
gggagagtctagggctgtaat

SEQ ID NO: 4062 - DNA, 21 bp, synthetic construct
  source 1..21: mol_type = other DNA
attacagccctagactctcct

SEQ ID NO: 4063 - DNA, 21 bp, synthetic construct
  source 1..21: mol_type = other DNA
aggagagtctagggctgtaat

SEQ ID NO: 4064 - DNA, 21 bp, synthetic construct
  source 1..21: mol_type = other DNA
attacagccctatactctccc

SEQ ID NO: 4065 - DNA, 21 bp, synthetic construct
  source 1..21: mol_type = other DNA
gggagagtatagggctgtaat

SEQ ID NO: 4066 - DNA, 21 bp, synthetic construct
  source 1..21: mol_type = other DNA
attacagccctatactctcct

SEQ ID NO: 4067 - DNA, 21 bp, synthetic construct
  source 1..21: mol_type = other DNA
aggagagtatagggctgtaat

SEQ ID NO: 4068 - DNA, 21 bp, synthetic construct
  source 1..21: mol_type = other DNA
attccagccctagactctccc

SEQ ID NO: 4069 - DNA, 21 bp, synthetic construct
  source 1..21: mol_type = other DNA
gggagagtctagggctggaat

SEQ ID NO: 4070 - DNA, 21 bp, synthetic construct
  source 1..21: mol_type = other DNA
attccagccctagactctcct

SEQ ID NO: 4071 - DNA, 21 bp, synthetic construct
  source 1..21: mol_type = other DNA
aggagagtctagggctggaat

SEQ ID NO: 4072 - DNA, 21 bp, synthetic construct
  source 1..21: mol_type = other DNA
attccagccctatactctccc

SEQ ID NO: 4073 - DNA, 21 bp, synthetic construct
  source 1..21: mol_type = other DNA
gggagagtatagggctggaat

SEQ ID NO: 4074 - DNA, 21 bp, synthetic construct
  source 1..21: mol_type = other DNA
attccagccctatactctcct

SEQ ID NO: 4075 - DNA, 21 bp, synthetic construct
  source 1..21: mol_type = other DNA
aggagagtatagggctggaat

SEQ ID NO: 4076 - DNA, 19 bp, synthetic construct
  source 1..19: mol_type = other DNA
agatgtcatgagagataag

SEQ ID NO: 4077 - DNA, 19 bp, synthetic construct
  source 1..19: mol_type = other DNA
cttatctctcatgacatct

SEQ ID NO: 4078 - DNA, 19 bp, synthetic construct
  source 1..19: mol_type = other DNA
agatgtcatgagagataac

SEQ ID NO: 4079 - DNA, 19 bp, synthetic construct
  source 1..19: mol_type = other DNA
gttatctctcatgacatct

SEQ ID NO: 4080 - DNA, 19 bp, synthetic construct
  source 1..19: mol_type = other DNA
agatgtcatgacagataag

SEQ ID NO: 4081 - DNA, 19 bp, synthetic construct
  source 1..19: mol_type = other DNA
cttatctgtcatgacatct

SEQ ID NO: 4082 - DNA, 19 bp, synthetic construct
  source 1..19: mol_type = other DNA
agatgtcatgacagataac

SEQ ID NO: 4083 - DNA, 19 bp, synthetic construct
  source 1..19: mol_type = other DNA
gttatctgtcatgacatct

SEQ ID NO: 4084 - DNA, 19 bp, synthetic construct
  source 1..19: mol_type = other DNA
agatgtcatgggagataag

SEQ ID NO: 4085 - DNA, 19 bp, synthetic construct
  source 1..19: mol_type = other DNA
cttatctcccatgacatct

SEQ ID NO: 4086 - DNA, 19 bp, synthetic construct
  source 1..19: mol_type = other DNA
agatgtcatgggagataac

SEQ ID NO: 4087 - DNA, 19 bp, synthetic construct
  source 1..19: mol_type = other DNA
gttatctcccatgacatct

SEQ ID NO: 4088 - DNA, 19 bp, synthetic construct
  source 1..19: mol_type = other DNA
agatgtcatggcagataag

SEQ ID NO: 4089 - DNA, 19 bp, synthetic construct
  source 1..19: mol_type = other DNA
cttatctgccatgacatct

SEQ ID NO: 4090 - DNA, 19 bp, synthetic construct
  source 1..19: mol_type = other DNA
agatgtcatggcagataac

SEQ ID NO: 4091 - DNA, 19 bp, synthetic construct
  source 1..19: mol_type = other DNA
gttatctgccatgacatct

SEQ ID NO: 4092 - DNA, 19 bp, synthetic construct
  source 1..19: mol_type = other DNA
agatgtcatgtgagataag

SEQ ID NO: 4093 - DNA, 19 bp, synthetic construct
  source 1..19: mol_type = other DNA
cttatctcacatgacatct

SEQ ID NO: 4094 - DNA, 19 bp, synthetic construct
  source 1..19: mol_type = other DNA
agatgtcatgtgagataac

SEQ ID NO: 4095 - DNA, 19 bp, synthetic construct
  source 1..19: mol_type = other DNA
gttatctcacatgacatct

SEQ ID NO: 4096 - DNA, 19 bp, synthetic construct
  source 1..19: mol_type = other DNA
agatgtcatgtcagataag

SEQ ID NO: 4097 - DNA, 19 bp, synthetic construct
  source 1..19: mol_type = other DNA
cttatctgacatgacatct

SEQ ID NO: 4098 - DNA, 19 bp, synthetic construct
  source 1..19: mol_type = other DNA
agatgtcatgtcagataac

SEQ ID NO: 4099 - DNA, 19 bp, synthetic construct
  source 1..19: mol_type = other DNA
gttatctgacatgacatct

SEQ ID NO: 4100 - DNA, 19 bp, synthetic construct
  source 1..19: mol_type = other DNA
agatgtcgtgagagataag

SEQ ID NO: 4101 - DNA, 19 bp, synthetic construct
  source 1..19: mol_type = other DNA
cttatctctcacgacatct

SEQ ID NO: 4102 - DNA, 19 bp, synthetic construct
  source 1..19: mol_type = other DNA
agatgtcgtgagagataac

SEQ ID NO: 4103 - DNA, 19 bp, synthetic construct
  source 1..19: mol_type = other DNA
gttatctctcacgacatct

SEQ ID NO: 4104 - DNA, 19 bp, synthetic construct
  source 1..19: mol_type = other DNA
agatgtcgtgacagataag

SEQ ID NO: 4105 - DNA, 19 bp, synthetic construct
  source 1..19: mol_type = other DNA
cttatctgtcacgacatct

SEQ ID NO: 4106 - DNA, 19 bp, synthetic construct
  source 1..19: mol_type = other DNA
agatgtcgtgacagataac

SEQ ID NO: 4107 - DNA, 19 bp, synthetic construct
  source 1..19: mol_type = other DNA
gttatctgtcacgacatct

SEQ ID NO: 4108 - DNA, 19 bp, synthetic construct
  source 1..19: mol_type = other DNA
agatgtcgtgggagataag

SEQ ID NO: 4109 - DNA, 19 bp, synthetic construct
  source 1..19: mol_type = other DNA
cttatctcccacgacatct

SEQ ID NO: 4110 - DNA, 19 bp, synthetic construct
  source 1..19: mol_type = other DNA
agatgtcgtgggagataac

SEQ ID NO: 4111 - DNA, 19 bp, synthetic construct
  source 1..19: mol_type = other DNA
gttatctcccacgacatct

SEQ ID NO: 4112 - DNA, 19 bp, synthetic construct
  source 1..19: mol_type = other DNA
agatgtcgtggcagataag

SEQ ID NO: 4113 - DNA, 19 bp, synthetic construct
  source 1..19: mol_type = other DNA
cttatctgccacgacatct

SEQ ID NO: 4114 - DNA, 19 bp, synthetic construct
  source 1..19: mol_type = other DNA
agatgtcgtggcagataac

SEQ ID NO: 4115 - DNA, 19 bp, synthetic construct
  source 1..19: mol_type = other DNA
gttatctgccacgacatct

SEQ ID NO: 4116 - DNA, 19 bp, synthetic construct
  source 1..19: mol_type = other DNA
agatgtcgtgtgagataag

SEQ ID NO: 4117 - DNA, 19 bp, synthetic construct
  source 1..19: mol_type = other DNA
cttatctcacacgacatct

SEQ ID NO: 4118 - DNA, 19 bp, synthetic construct
  source 1..19: mol_type = other DNA
agatgtcgtgtgagataac

SEQ ID NO: 4119 - DNA, 19 bp, synthetic construct
  source 1..19: mol_type = other DNA
gttatctcacacgacatct

SEQ ID NO: 4120 - DNA, 19 bp, synthetic construct
  source 1..19: mol_type = other DNA
agatgtcgtgtcagataag

SEQ ID NO: 4121 - DNA, 19 bp, synthetic construct
  source 1..19: mol_type = other DNA
cttatctgacacgacatct

SEQ ID NO: 4122 - DNA, 19 bp, synthetic construct
  source 1..19: mol_type = other DNA
agatgtcgtgtcagataac

SEQ ID NO: 4123 - DNA, 19 bp, synthetic construct
  source 1..19: mol_type = other DNA
gttatctgacacgacatct

SEQ ID NO: 4124 - DNA, 19 bp, synthetic construct
  source 1..19: mol_type = other DNA
agatgtcttgagagataag

SEQ ID NO: 4125 - DNA, 19 bp, synthetic construct
  source 1..19: mol_type = other DNA
cttatctctcaagacatct

SEQ ID NO: 4126 - DNA, 19 bp, synthetic construct
  source 1..19: mol_type = other DNA
agatgtcttgagagataac

SEQ ID NO: 4127 - DNA, 19 bp, synthetic construct
  source 1..19: mol_type = other DNA
gttatctctcaagacatct

SEQ ID NO: 4128 - DNA, 19 bp, synthetic construct
  source 1..19: mol_type = other DNA
agatgtcttgacagataag

SEQ ID NO: 4129 - DNA, 19 bp, synthetic construct
  source 1..19: mol_type = other DNA
cttatctgtcaagacatct

SEQ ID NO: 4130 - DNA, 19 bp, synthetic construct
  source 1..19: mol_type = other DNA
agatgtcttgacagataac

SEQ ID NO: 4131 - DNA, 19 bp, synthetic construct
  source 1..19: mol_type = other DNA
gttatctgtcaagacatct

SEQ ID NO: 4132 - DNA, 19 bp, synthetic construct
  source 1..19: mol_type = other DNA
agatgtcttgggagataag

SEQ ID NO: 4133 - DNA, 19 bp, synthetic construct
  source 1..19: mol_type = other DNA
cttatctcccaagacatct

SEQ ID NO: 4134 - DNA, 19 bp, synthetic construct
  source 1..19: mol_type = other DNA
agatgtcttgggagataac

SEQ ID NO: 4135 - DNA, 19 bp, synthetic construct
  source 1..19: mol_type = other DNA
gttatctcccaagacatct

SEQ ID NO: 4136 - DNA, 19 bp, synthetic construct
  source 1..19: mol_type = other DNA
agatgtcttggcagataag

SEQ ID NO: 4137 - DNA, 19 bp, synthetic construct
  source 1..19: mol_type = other DNA
cttatctgccaagacatct

SEQ ID NO: 4138 - DNA, 19 bp, synthetic construct
  source 1..19: mol_type = other DNA
agatgtcttggcagataac

SEQ ID NO: 4139 - DNA, 19 bp, synthetic construct
  source 1..19: mol_type = other DNA
gttatctgccaagacatct

SEQ ID NO: 4140 - DNA, 19 bp, synthetic construct
  source 1..19: mol_type = other DNA
agatgtcttgtgagataag

SEQ ID NO: 4141 - DNA, 19 bp, synthetic construct
  source 1..19: mol_type = other DNA
cttatctcacaagacatct

SEQ ID NO: 4142 - DNA, 19 bp, synthetic construct
  source 1..19: mol_type = other DNA
agatgtcttgtgagataac

SEQ ID NO: 4143 - DNA, 19 bp, synthetic construct
  source 1..19: mol_type = other DNA
gttatctcacaagacatct

SEQ ID NO: 4144 - DNA, 19 bp, synthetic construct
  source 1..19: mol_type = other DNA
agatgtcttgtcagataag

SEQ ID NO: 4145 - DNA, 19 bp, synthetic construct
  source 1..19: mol_type = other DNA
cttatctgacaagacatct

SEQ ID NO: 4146 - DNA, 19 bp, synthetic construct
  source 1..19: mol_type = other DNA
agatgtcttgtcagataac

SEQ ID NO: 4147 - DNA, 19 bp, synthetic construct
  source 1..19: mol_type = other DNA
gttatctgacaagacatct

SEQ ID NO: 4148 - DNA, 19 bp, synthetic construct
  source 1..19: mol_type = other DNA
agatctcatgagagataag

SEQ ID NO: 4149 - DNA, 19 bp, synthetic construct
  source 1..19: mol_type = other DNA
cttatctctcatgagatct

SEQ ID NO: 4150 - DNA, 19 bp, synthetic construct
  source 1..19: mol_type = other DNA
agatctcatgagagataac

SEQ ID NO: 4151 - DNA, 19 bp, synthetic construct
  source 1..19: mol_type = other DNA
gttatctctcatgagatct

SEQ ID NO: 4152 - DNA, 19 bp, synthetic construct
  source 1..19: mol_type = other DNA
agatctcatgacagataag

SEQ ID NO: 4153 - DNA, 19 bp, synthetic construct
  source 1..19: mol_type = other DNA
cttatctgtcatgagatct

SEQ ID NO: 4154 - DNA, 19 bp, synthetic construct
  source 1..19: mol_type = other DNA
agatctcatgacagataac

SEQ ID NO: 4155 - DNA, 19 bp, synthetic construct
  source 1..19: mol_type = other DNA
gttatctgtcatgagatct

SEQ ID NO: 4156 - DNA, 19 bp, synthetic construct
  source 1..19: mol_type = other DNA
agatctcatgggagataag

SEQ ID NO: 4157 - DNA, 19 bp, synthetic construct
  source 1..19: mol_type = other DNA
cttatctcccatgagatct

SEQ ID NO: 4158 - DNA, 19 bp, synthetic construct
  source 1..19: mol_type = other DNA
agatctcatgggagataac

SEQ ID NO: 4159 - DNA, 19 bp, synthetic construct
  source 1..19: mol_type = other DNA
gttatctcccatgagatct

SEQ ID NO: 4160 - DNA, 19 bp, synthetic construct
  source 1..19: mol_type = other DNA
agatctcatggcagataag

SEQ ID NO: 4161 - DNA, 19 bp, synthetic construct
  source 1..19: mol_type = other DNA
cttatctgccatgagatct

SEQ ID NO: 4162 - DNA, 19 bp, synthetic construct
  source 1..19: mol_type = other DNA
agatctcatggcagataac

SEQ ID NO: 4163 - DNA, 19 bp, synthetic construct
  source 1..19: mol_type = other DNA
gttatctgccatgagatct

SEQ ID NO: 4164 - DNA, 19 bp, synthetic construct
  source 1..19: mol_type = other DNA
agatctcatgtgagataag

SEQ ID NO: 4165 - DNA, 19 bp, synthetic construct
  source 1..19: mol_type = other DNA
cttatctcacatgagatct

SEQ ID NO: 4166 - DNA, 19 bp, synthetic construct
  source 1..19: mol_type = other DNA
agatctcatgtgagataac

SEQ ID NO: 4167 - DNA, 19 bp, synthetic construct
  source 1..19: mol_type = other DNA
gttatctcacatgagatct

SEQ ID NO: 4168 - DNA, 19 bp, synthetic construct
  source 1..19: mol_type = other DNA
agatctcatgtcagataag

SEQ ID NO: 4169 - DNA, 19 bp, synthetic construct
  source 1..19: mol_type = other DNA
cttatctgacatgagatct

SEQ ID NO: 4170 - DNA, 19 bp, synthetic construct
  source 1..19: mol_type = other DNA
agatctcatgtcagataac

SEQ ID NO: 4171 - DNA, 19 bp, synthetic construct
  source 1..19: mol_type = other DNA
gttatctgacatgagatct

SEQ ID NO: 4172 - DNA, 19 bp, synthetic construct
  source 1..19: mol_type = other DNA
agatctcgtgagagataag

SEQ ID NO: 4173 - DNA, 19 bp, synthetic construct
  source 1..19: mol_type = other DNA
cttatctctcacgagatct

SEQ ID NO: 4174 - DNA, 19 bp, synthetic construct
  source 1..19: mol_type = other DNA
agatctcgtgagagataac

SEQ ID NO: 4175 - DNA, 19 bp, synthetic construct
  source 1..19: mol_type = other DNA
gttatctctcacgagatct

SEQ ID NO: 4176 - DNA, 19 bp, synthetic construct
  source 1..19: mol_type = other DNA
agatctcgtgacagataag

SEQ ID NO: 4177 - DNA, 19 bp, synthetic construct
  source 1..19: mol_type = other DNA
cttatctgtcacgagatct

SEQ ID NO: 4178 - DNA, 19 bp, synthetic construct
  source 1..19: mol_type = other DNA
agatctcgtgacagataac

SEQ ID NO: 4179 - DNA, 19 bp, synthetic construct
  source 1..19: mol_type = other DNA
gttatctgtcacgagatct

SEQ ID NO: 4180 - DNA, 19 bp, synthetic construct
  source 1..19: mol_type = other DNA
agatctcgtgggagataag

SEQ ID NO: 4181 - DNA, 19 bp, synthetic construct
  source 1..19: mol_type = other DNA
cttatctcccacgagatct

SEQ ID NO: 4182 - DNA, 19 bp, synthetic construct
  source 1..19: mol_type = other DNA
agatctcgtgggagataac

SEQ ID NO: 4183 - DNA, 19 bp, synthetic construct
  source 1..19: mol_type = other DNA
gttatctcccacgagatct

SEQ ID NO: 4184 - DNA, 19 bp, synthetic construct
  source 1..19: mol_type = other DNA
agatctcgtggcagataag

SEQ ID NO: 4185 - DNA, 19 bp, synthetic construct
  source 1..19: mol_type = other DNA
cttatctgccacgagatct

SEQ ID NO: 4186 - DNA, 19 bp, synthetic construct
  source 1..19: mol_type = other DNA
agatctcgtggcagataac

SEQ ID NO: 4187 - DNA, 19 bp, synthetic construct
  source 1..19: mol_type = other DNA
gttatctgccacgagatct

SEQ ID NO: 4188 - DNA, 19 bp, synthetic construct
  source 1..19: mol_type = other DNA
agatctcgtgtgagataag

SEQ ID NO: 4189 - DNA, 19 bp, synthetic construct
  source 1..19: mol_type = other DNA
cttatctcacacgagatct

SEQ ID NO: 4190 - DNA, 19 bp, synthetic construct
  source 1..19: mol_type = other DNA
agatctcgtgtgagataac

SEQ ID NO: 4191 - DNA, 19 bp, synthetic construct
  source 1..19: mol_type = other DNA
gttatctcacacgagatct

SEQ ID NO: 4192 - DNA, 19 bp, synthetic construct
  source 1..19: mol_type = other DNA
agatctcgtgtcagataag

SEQ ID NO: 4193 - DNA, 19 bp, synthetic construct
  source 1..19: mol_type = other DNA
cttatctgacacgagatct

SEQ ID NO: 4194 - DNA, 19 bp, synthetic construct
  source 1..19: mol_type = other DNA
agatctcgtgtcagataac

SEQ ID NO: 4195 - DNA, 19 bp, synthetic construct
  source 1..19: mol_type = other DNA
gttatctgacacgagatct

SEQ ID NO: 4196 - DNA, 19 bp, synthetic construct
  source 1..19: mol_type = other DNA
agatctcttgagagataag

SEQ ID NO: 4197 - DNA, 19 bp, synthetic construct
  source 1..19: mol_type = other DNA
cttatctctcaagagatct

SEQ ID NO: 4198 - DNA, 19 bp, synthetic construct
  source 1..19: mol_type = other DNA
agatctcttgagagataac

SEQ ID NO: 4199 - DNA, 19 bp, synthetic construct
  source 1..19: mol_type = other DNA
gttatctctcaagagatct

SEQ ID NO: 4200 - DNA, 19 bp, synthetic construct
  source 1..19: mol_type = other DNA
agatctcttgacagataag

SEQ ID NO: 4201 - DNA, 19 bp, synthetic construct
  source 1..19: mol_type = other DNA
cttatctgtcaagagatct

SEQ ID NO: 4202 - DNA, 19 bp, synthetic construct
  source 1..19: mol_type = other DNA
agatctcttgacagataac

SEQ ID NO: 4203 - DNA, 19 bp, synthetic construct
  source 1..19: mol_type = other DNA
gttatctgtcaagagatct

SEQ ID NO: 4204 - DNA, 19 bp, synthetic construct
  source 1..19: mol_type = other DNA
agatctcttgggagataag

SEQ ID NO: 4205 - DNA, 19 bp, synthetic construct
  source 1..19: mol_type = other DNA
cttatctcccaagagatct

SEQ ID NO: 4206 - DNA, 19 bp, synthetic construct
  source 1..19: mol_type = other DNA
agatctcttgggagataac

SEQ ID NO: 4207 - DNA, 19 bp, synthetic construct
  source 1..19: mol_type = other DNA
gttatctcccaagagatct

SEQ ID NO: 4208 - DNA, 19 bp, synthetic construct
  source 1..19: mol_type = other DNA
agatctcttggcagataag

SEQ ID NO: 4209 - DNA, 19 bp, synthetic construct
  source 1..19: mol_type = other DNA
cttatctgccaagagatct

SEQ ID NO: 4210 - DNA, 19 bp, synthetic construct
  source 1..19: mol_type = other DNA
agatctcttggcagataac

SEQ ID NO: 4211 - DNA, 19 bp, synthetic construct
  source 1..19: mol_type = other DNA
gttatctgccaagagatct

SEQ ID NO: 4212 - DNA, 19 bp, synthetic construct
  source 1..19: mol_type = other DNA
agatctcttgtgagataag

SEQ ID NO: 4213 - DNA, 19 bp, synthetic construct
  source 1..19: mol_type = other DNA
cttatctcacaagagatct

SEQ ID NO: 4214 - DNA, 19 bp, synthetic construct
  source 1..19: mol_type = other DNA
agatctcttgtgagataac

SEQ ID NO: 4215 - DNA, 19 bp, synthetic construct
  source 1..19: mol_type = other DNA
gttatctcacaagagatct

SEQ ID NO: 4216 - DNA, 19 bp, synthetic construct
  source 1..19: mol_type = other DNA
agatctcttgtcagataag

SEQ ID NO: 4217 - DNA, 19 bp, synthetic construct
  source 1..19: mol_type = other DNA
cttatctgacaagagatct

SEQ ID NO: 4218 - DNA, 19 bp, synthetic construct
  source 1..19: mol_type = other DNA
agatctcttgtcagataac

SEQ ID NO: 4219 - DNA, 19 bp, synthetic construct
  source 1..19: mol_type = other DNA
gttatctgacaagagatct

SEQ ID NO: 4220 - DNA, 14 bp, synthetic construct
  source 1..14: mol_type = other DNA
tgacctttgcccca

SEQ ID NO: 4221 - DNA, 14 bp, synthetic construct
  source 1..14: mol_type = other DNA
tggggcaaaggtca

SEQ ID NO: 4222 - DNA, 12 bp, synthetic construct
  source 1..12: mol_type = other DNA
gctatttttagc

SEQ ID NO: 4223 - DNA, 12 bp, synthetic construct
  source 1..12: mol_type = other DNA
gctaaaaatagc

SEQ ID NO: 4224 - DNA, 10 bp, synthetic construct
  source 1..10: mol_type = other DNA
aaccggaagt

SEQ ID NO: 4225 - DNA, 10 bp, synthetic construct
  source 1..10: mol_type = other DNA
acttccggtt

SEQ ID NO: 4226-4247 - skipped (22 entries)

SEQ ID NO: 4248 - DNA, 15 bp, synthetic construct
  source 1..15: mol_type = other DNA
aaccacgcacccatc

SEQ ID NO: 4249 - DNA, 15 bp, synthetic construct
  source 1..15: mol_type = other DNA
gatgggtgcgtggtt

SEQ ID NO: 4250 - DNA, 15 bp, synthetic construct
  source 1..15: mol_type = other DNA
aaccacgcacccatt

SEQ ID NO: 4251 - DNA, 15 bp, synthetic construct
  source 1..15: mol_type = other DNA
aatgggtgcgtggtt

SEQ ID NO: 4252 - DNA, 15 bp, synthetic construct
  source 1..15: mol_type = other DNA
aaccacgcacccctc

SEQ ID NO: 4253 - DNA, 15 bp, synthetic construct
  source 1..15: mol_type = other DNA
gaggggtgcgtggtt

SEQ ID NO: 4254 - DNA, 15 bp, synthetic construct
  source 1..15: mol_type = other DNA
aaccacgcacccctt

SEQ ID NO: 4255 - DNA, 15 bp, synthetic construct
  source 1..15: mol_type = other DNA
aaggggtgcgtggtt

SEQ ID NO: 4256 - DNA, 15 bp, synthetic construct
  source 1..15: mol_type = other DNA
acccacgcacccatc

SEQ ID NO: 4257 - DNA, 15 bp, synthetic construct
  source 1..15: mol_type = other DNA
gatgggtgcgtgggt

SEQ ID NO: 4258 - DNA, 15 bp, synthetic construct
  source 1..15: mol_type = other DNA
acccacgcacccatt

SEQ ID NO: 4259 - DNA, 15 bp, synthetic construct
  source 1..15: mol_type = other DNA
aatgggtgcgtgggt

SEQ ID NO: 4260 - DNA, 15 bp, synthetic construct
  source 1..15: mol_type = other DNA
acccacgcacccctc

SEQ ID NO: 4261 - DNA, 15 bp, synthetic construct
  source 1..15: mol_type = other DNA
gaggggtgcgtgggt

SEQ ID NO: 4262 - DNA, 15 bp, synthetic construct
  source 1..15: mol_type = other DNA
acccacgcacccctt

SEQ ID NO: 4263 - DNA, 15 bp, synthetic construct
  source 1..15: mol_type = other DNA
aaggggtgcgtgggt

SEQ ID NO: 4264 - DNA, 15 bp, synthetic construct
  source 1..15: mol_type = other DNA
caccacgcacccatc

SEQ ID NO: 4265 - DNA, 15 bp, synthetic construct
  source 1..15: mol_type = other DNA
gatgggtgcgtggtg

SEQ ID NO: 4266 - DNA, 15 bp, synthetic construct
  source 1..15: mol_type = other DNA
caccacgcacccatt

SEQ ID NO: 4267 - DNA, 15 bp, synthetic construct
  source 1..15: mol_type = other DNA
aatgggtgcgtggtg

SEQ ID NO: 4268 - DNA, 15 bp, synthetic construct
  source 1..15: mol_type = other DNA
caccacgcacccctc

SEQ ID NO: 4269 - DNA, 15 bp, synthetic construct
  source 1..15: mol_type = other DNA
gaggggtgcgtggtg

SEQ ID NO: 4270 - DNA, 15 bp, synthetic construct
  source 1..15: mol_type = other DNA
caccacgcacccctt

SEQ ID NO: 4271 - DNA, 15 bp, synthetic construct
  source 1..15: mol_type = other DNA
aaggggtgcgtggtg

SEQ ID NO: 4272 - DNA, 15 bp, synthetic construct
  source 1..15: mol_type = other DNA
ccccacgcacccatc

SEQ ID NO: 4273 - DNA, 15 bp, synthetic construct
  source 1..15: mol_type = other DNA
gatgggtgcgtgggg

SEQ ID NO: 4274 - DNA, 15 bp, synthetic construct
  source 1..15: mol_type = other DNA
ccccacgcacccatt

SEQ ID NO: 4275 - DNA, 15 bp, synthetic construct
  source 1..15: mol_type = other DNA
aatgggtgcgtgggg

SEQ ID NO: 4276 - DNA, 15 bp, synthetic construct
  source 1..15: mol_type = other DNA
ccccacgcacccctc

SEQ ID NO: 4277 - DNA, 15 bp, synthetic construct
  source 1..15: mol_type = other DNA
gaggggtgcgtgggg

SEQ ID NO: 4278 - DNA, 15 bp, synthetic construct
  source 1..15: mol_type = other DNA
ccccacgcacccctt

SEQ ID NO: 4279 - DNA, 15 bp, synthetic construct
  source 1..15: mol_type = other DNA
aaggggtgcgtgggg

SEQ ID NO: 4280 - DNA, 19 bp, synthetic construct
  source 1..19: mol_type = other DNA
gctgttccatctgccgccc

SEQ ID NO: 4281 - DNA, 19 bp, synthetic construct
  source 1..19: mol_type = other DNA
gggcggcagatggaacagc

SEQ ID NO: 4282 - DNA, 19 bp, synthetic construct
  source 1..19: mol_type = other DNA
gctcttccatctgccgccc

SEQ ID NO: 4283 - DNA, 19 bp, synthetic construct
  source 1..19: mol_type = other DNA
gggcggcagatggaagagc

SEQ ID NO: 4284 - DNA, 10 bp, synthetic construct
  source 1..10: mol_type = other DNA
accggaagta

SEQ ID NO: 4285 - DNA, 10 bp, synthetic construct
  source 1..10: mol_type = other DNA
tacttccggt

SEQ ID NO: 4286 - DNA, 10 bp, synthetic construct
  source 1..10: mol_type = other DNA
accggaagtg

SEQ ID NO: 4287 - DNA, 10 bp, synthetic construct
  source 1..10: mol_type = other DNA
cacttccggt

SEQ ID NO: 4288 - DNA, 11 bp, synthetic construct
  source 1..11: mol_type = other DNA
aaccggaaata

SEQ ID NO: 4289 - DNA, 11 bp, synthetic construct
  source 1..11: mol_type = other DNA
tatttccggtt

SEQ ID NO: 4290 - DNA, 11 bp, synthetic construct
  source 1..11: mol_type = other DNA
aaccggaaatg

SEQ ID NO: 4291 - DNA, 11 bp, synthetic construct
  source 1..11: mol_type = other DNA
catttccggtt

SEQ ID NO: 4292 - DNA, 10 bp, synthetic construct
  source 1..10: mol_type = other DNA
ccacgcccac

SEQ ID NO: 4293 - DNA, 10 bp, synthetic construct
  source 1..10: mol_type = other DNA
gtgggcgtgg

SEQ ID NO: 4294 - DNA, 10 bp, synthetic construct
  source 1..10: mol_type = other DNA
ccacgccccc

SEQ ID NO: 4295 - DNA, 10 bp, synthetic construct
  source 1..10: mol_type = other DNA
gggggcgtgg

SEQ ID NO: 4296 - DNA, 10 bp, synthetic construct
  source 1..10: mol_type = other DNA
acgaggaagt

SEQ ID NO: 4297 - DNA, 10 bp, synthetic construct
  source 1..10: mol_type = other DNA
acttcctcgt

SEQ ID NO: 4298 - DNA, 10 bp, synthetic construct
  source 1..10: mol_type = other DNA
acgcggaagt

SEQ ID NO: 4299 - DNA, 10 bp, synthetic construct
  source 1..10: mol_type = other DNA
acttccgcgt

SEQ ID NO: 4300 - DNA, 10 bp, synthetic construct
  source 1..10: mol_type = other DNA
accaggaagt

SEQ ID NO: 4301 - DNA, 10 bp, synthetic construct
  source 1..10: mol_type = other DNA
acttcctggt

SEQ ID NO: 4302 - DNA, 10 bp, synthetic construct
  source 1..10: mol_type = other DNA
acccggaagt

SEQ ID NO: 4303 - DNA, 10 bp, synthetic construct
  source 1..10: mol_type = other DNA
acttccgggt

SEQ ID NO: 4304 - DNA, 10 bp, synthetic construct
  source 1..10: mol_type = other DNA
aaccggaagt

SEQ ID NO: 4305 - DNA, 10 bp, synthetic construct
  source 1..10: mol_type = other DNA
acttccggtt

SEQ ID NO: 4306 - DNA, 10 bp, synthetic construct
  source 1..10: mol_type = other DNA
acaaggaagt

SEQ ID NO: 4307 - DNA, 10 bp, synthetic construct
  source 1..10: mol_type = other DNA
acttccttgt

SEQ ID NO: 4308 - DNA, 10 bp, synthetic construct
  source 1..10: mol_type = other DNA
accaggaagt

SEQ ID NO: 4309 - DNA, 10 bp, synthetic construct
  source 1..10: mol_type = other DNA
acttcctggt

SEQ ID NO: 4310 - DNA, 10 bp, synthetic construct
  source 1..10: mol_type = other DNA
acgaggaagt

SEQ ID NO: 4311 - DNA, 10 bp, synthetic construct
  source 1..10: mol_type = other DNA
acttcctcgt

SEQ ID NO: 4312 - DNA, 20 bp, synthetic construct
  source 1..20: mol_type = other DNA
gaatggaaaaaatgagtcat

SEQ ID NO: 4313 - DNA, 20 bp, synthetic construct
  source 1..20: mol_type = other DNA
atgactcattttttccattc

SEQ ID NO: 4314-4315 - skipped (2 entries)

SEQ ID NO: 4316 - DNA, 17 bp, synthetic construct
  source 1..17: mol_type = other DNA
gggaaaaagaacagatg

SEQ ID NO: 4317 - DNA, 17 bp, synthetic construct
  source 1..17: mol_type = other DNA
catctgttctttttccc

SEQ ID NO: 4318 - DNA, 17 bp, synthetic construct
  source 1..17: mol_type = other DNA
gggaaaaagaacagctg

SEQ ID NO: 4319 - DNA, 17 bp, synthetic construct
  source 1..17: mol_type = other DNA
cagctgttctttttccc

SEQ ID NO: 4320 - DNA, 17 bp, synthetic construct
  source 1..17: mol_type = other DNA
gggaaaaagaccagatg

SEQ ID NO: 4321 - DNA, 17 bp, synthetic construct
  source 1..17: mol_type = other DNA
catctggtctttttccc

SEQ ID NO: 4322 - DNA, 17 bp, synthetic construct
  source 1..17: mol_type = other DNA
gggaaaaagaccagctg

SEQ ID NO: 4323 - DNA, 17 bp, synthetic construct
  source 1..17: mol_type = other DNA
cagctggtctttttccc

SEQ ID NO: 4324 - DNA, 17 bp, synthetic construct
  source 1..17: mol_type = other DNA
gggaaaaaggacagatg

SEQ ID NO: 4325 - DNA, 17 bp, synthetic construct
  source 1..17: mol_type = other DNA
catctgtcctttttccc

SEQ ID NO: 4326 - DNA, 17 bp, synthetic construct
  source 1..17: mol_type = other DNA
gggaaaaaggacagctg

SEQ ID NO: 4327 - DNA, 17 bp, synthetic construct
  source 1..17: mol_type = other DNA
cagctgtcctttttccc

SEQ ID NO: 4328 - DNA, 17 bp, synthetic construct
  source 1..17: mol_type = other DNA
gggaaaaaggccagatg

SEQ ID NO: 4329 - DNA, 17 bp, synthetic construct
  source 1..17: mol_type = other DNA
catctggcctttttccc

SEQ ID NO: 4330 - DNA, 17 bp, synthetic construct
  source 1..17: mol_type = other DNA
gggaaaaaggccagctg

SEQ ID NO: 4331 - DNA, 17 bp, synthetic construct
  source 1..17: mol_type = other DNA
cagctggcctttttccc

SEQ ID NO: 4332 - DNA, 17 bp, synthetic construct
  source 1..17: mol_type = other DNA
gggaaaaggaacagatg

SEQ ID NO: 4333 - DNA, 17 bp, synthetic construct
  source 1..17: mol_type = other DNA
catctgttccttttccc

SEQ ID NO: 4334 - DNA, 17 bp, synthetic construct
  source 1..17: mol_type = other DNA
gggaaaaggaacagctg

SEQ ID NO: 4335 - DNA, 17 bp, synthetic construct
  source 1..17: mol_type = other DNA
cagctgttccttttccc

SEQ ID NO: 4336 - DNA, 17 bp, synthetic construct
  source 1..17: mol_type = other DNA
gggaaaaggaccagatg

SEQ ID NO: 4337 - DNA, 17 bp, synthetic construct
  source 1..17: mol_type = other DNA
catctggtccttttccc

SEQ ID NO: 4338 - DNA, 17 bp, synthetic construct
  source 1..17: mol_type = other DNA
gggaaaaggaccagctg

SEQ ID NO: 4339 - DNA, 17 bp, synthetic construct
  source 1..17: mol_type = other DNA
cagctggtccttttccc

SEQ ID NO: 4340 - DNA, 17 bp, synthetic construct
  source 1..17: mol_type = other DNA
gggaaaagggacagatg

SEQ ID NO: 4341 - DNA, 17 bp, synthetic construct
  source 1..17: mol_type = other DNA
catctgtcccttttccc

SEQ ID NO: 4342 - DNA, 17 bp, synthetic construct
  source 1..17: mol_type = other DNA
gggaaaagggacagctg

SEQ ID NO: 4343 - DNA, 17 bp, synthetic construct
  source 1..17: mol_type = other DNA
cagctgtcccttttccc

SEQ ID NO: 4344 - DNA, 17 bp, synthetic construct
  source 1..17: mol_type = other DNA
gggaaaagggccagatg

SEQ ID NO: 4345 - DNA, 17 bp, synthetic construct
  source 1..17: mol_type = other DNA
catctggcccttttccc

SEQ ID NO: 4346 - DNA, 17 bp, synthetic construct
  source 1..17: mol_type = other DNA
gggaaaagggccagctg

SEQ ID NO: 4347 - DNA, 17 bp, synthetic construct
  source 1..17: mol_type = other DNA
cagctggcccttttccc

SEQ ID NO: 4348 - DNA, 17 bp, synthetic construct
  source 1..17: mol_type = other DNA
gggaaagagaacagatg

SEQ ID NO: 4349 - DNA, 17 bp, synthetic construct
  source 1..17: mol_type = other DNA
catctgttctctttccc

SEQ ID NO: 4350 - DNA, 17 bp, synthetic construct
  source 1..17: mol_type = other DNA
gggaaagagaacagctg

SEQ ID NO: 4351 - DNA, 17 bp, synthetic construct
  source 1..17: mol_type = other DNA
cagctgttctctttccc

SEQ ID NO: 4352 - DNA, 17 bp, synthetic construct
  source 1..17: mol_type = other DNA
gggaaagagaccagatg

SEQ ID NO: 4353 - DNA, 17 bp, synthetic construct
  source 1..17: mol_type = other DNA
catctggtctctttccc

SEQ ID NO: 4354 - DNA, 17 bp, synthetic construct
  source 1..17: mol_type = other DNA
gggaaagagaccagctg

SEQ ID NO: 4355 - DNA, 17 bp, synthetic construct
  source 1..17: mol_type = other DNA
cagctggtctctttccc

SEQ ID NO: 4356 - DNA, 17 bp, synthetic construct
  source 1..17: mol_type = other DNA
gggaaagaggacagatg

SEQ ID NO: 4357 - DNA, 17 bp, synthetic construct
  source 1..17: mol_type = other DNA
catctgtcctctttccc

SEQ ID NO: 4358 - DNA, 17 bp, synthetic construct
  source 1..17: mol_type = other DNA
gggaaagaggacagctg

SEQ ID NO: 4359 - DNA, 17 bp, synthetic construct
  source 1..17: mol_type = other DNA
cagctgtcctctttccc

SEQ ID NO: 4360 - DNA, 17 bp, synthetic construct
  source 1..17: mol_type = other DNA
gggaaagaggccagatg

SEQ ID NO: 4361 - DNA, 17 bp, synthetic construct
  source 1..17: mol_type = other DNA
catctggcctctttccc

SEQ ID NO: 4362 - DNA, 17 bp, synthetic construct
  source 1..17: mol_type = other DNA
gggaaagaggccagctg

SEQ ID NO: 4363 - DNA, 17 bp, synthetic construct
  source 1..17: mol_type = other DNA
cagctggcctctttccc

SEQ ID NO: 4364 - DNA, 17 bp, synthetic construct
  source 1..17: mol_type = other DNA
gggaaagggaacagatg

SEQ ID NO: 4365 - DNA, 17 bp, synthetic construct
  source 1..17: mol_type = other DNA
catctgttccctttccc

SEQ ID NO: 4366 - DNA, 17 bp, synthetic construct
  source 1..17: mol_type = other DNA
gggaaagggaacagctg

SEQ ID NO: 4367 - DNA, 17 bp, synthetic construct
  source 1..17: mol_type = other DNA
cagctgttccctttccc

SEQ ID NO: 4368 - DNA, 17 bp, synthetic construct
  source 1..17: mol_type = other DNA
gggaaagggaccagatg

SEQ ID NO: 4369 - DNA, 17 bp, synthetic construct
  source 1..17: mol_type = other DNA
catctggtccctttccc

SEQ ID NO: 4370 - DNA, 17 bp, synthetic construct
  source 1..17: mol_type = other DNA
gggaaagggaccagctg

SEQ ID NO: 4371 - DNA, 17 bp, synthetic construct
  source 1..17: mol_type = other DNA
cagctggtccctttccc

SEQ ID NO: 4372 - DNA, 17 bp, synthetic construct
  source 1..17: mol_type = other DNA
gggaaaggggacagatg

SEQ ID NO: 4373 - DNA, 17 bp, synthetic construct
  source 1..17: mol_type = other DNA
catctgtcccctttccc

SEQ ID NO: 4374 - DNA, 17 bp, synthetic construct
  source 1..17: mol_type = other DNA
gggaaaggggacagctg

SEQ ID NO: 4375 - DNA, 17 bp, synthetic construct
  source 1..17: mol_type = other DNA
cagctgtcccctttccc

SEQ ID NO: 4376 - DNA, 17 bp, synthetic construct
  source 1..17: mol_type = other DNA
gggaaaggggccagatg

SEQ ID NO: 4377 - DNA, 17 bp, synthetic construct
  source 1..17: mol_type = other DNA
catctggcccctttccc

SEQ ID NO: 4378 - DNA, 17 bp, synthetic construct
  source 1..17: mol_type = other DNA
gggaaaggggccagctg

SEQ ID NO: 4379 - DNA, 17 bp, synthetic construct
  source 1..17: mol_type = other DNA
cagctggcccctttccc

SEQ ID NO: 4380 - DNA, 17 bp, synthetic construct
  source 1..17: mol_type = other DNA
ggggaaaagaacagatg

SEQ ID NO: 4381 - DNA, 17 bp, synthetic construct
  source 1..17: mol_type = other DNA
catctgttcttttcccc

SEQ ID NO: 4382 - DNA, 17 bp, synthetic construct
  source 1..17: mol_type = other DNA
ggggaaaagaacagctg

SEQ ID NO: 4383 - DNA, 17 bp, synthetic construct
  source 1..17: mol_type = other DNA
cagctgttcttttcccc

SEQ ID NO: 4384 - DNA, 17 bp, synthetic construct
  source 1..17: mol_type = other DNA
ggggaaaagaccagatg

SEQ ID NO: 4385 - DNA, 17 bp, synthetic construct
  source 1..17: mol_type = other DNA
catctggtcttttcccc

SEQ ID NO: 4386 - DNA, 17 bp, synthetic construct
  source 1..17: mol_type = other DNA
ggggaaaagaccagctg

SEQ ID NO: 4387 - DNA, 17 bp, synthetic construct
  source 1..17: mol_type = other DNA
cagctggtcttttcccc

SEQ ID NO: 4388 - DNA, 17 bp, synthetic construct
  source 1..17: mol_type = other DNA
ggggaaaaggacagatg

SEQ ID NO: 4389 - DNA, 17 bp, synthetic construct
  source 1..17: mol_type = other DNA
catctgtccttttcccc

SEQ ID NO: 4390 - DNA, 17 bp, synthetic construct
  source 1..17: mol_type = other DNA
ggggaaaaggacagctg

SEQ ID NO: 4391 - DNA, 17 bp, synthetic construct
  source 1..17: mol_type = other DNA
cagctgtccttttcccc

SEQ ID NO: 4392 - DNA, 17 bp, synthetic construct
  source 1..17: mol_type = other DNA
ggggaaaaggccagatg

SEQ ID NO: 4393 - DNA, 17 bp, synthetic construct
  source 1..17: mol_type = other DNA
catctggccttttcccc

SEQ ID NO: 4394 - DNA, 17 bp, synthetic construct
  source 1..17: mol_type = other DNA
ggggaaaaggccagctg

SEQ ID NO: 4395 - DNA, 17 bp, synthetic construct
  source 1..17: mol_type = other DNA
cagctggccttttcccc

SEQ ID NO: 4396 - DNA, 17 bp, synthetic construct
  source 1..17: mol_type = other DNA
ggggaaaggaacagatg

SEQ ID NO: 4397 - DNA, 17 bp, synthetic construct
  source 1..17: mol_type = other DNA
catctgttcctttcccc

SEQ ID NO: 4398 - DNA, 17 bp, synthetic construct
  source 1..17: mol_type = other DNA
ggggaaaggaacagctg

SEQ ID NO: 4399 - DNA, 17 bp, synthetic construct
  source 1..17: mol_type = other DNA
cagctgttcctttcccc

SEQ ID NO: 4400 - DNA, 17 bp, synthetic construct
  source 1..17: mol_type = other DNA
ggggaaaggaccagatg

SEQ ID NO: 4401 - DNA, 17 bp, synthetic construct
  source 1..17: mol_type = other DNA
catctggtcctttcccc

SEQ ID NO: 4402 - DNA, 17 bp, synthetic construct
  source 1..17: mol_type = other DNA
ggggaaaggaccagctg

SEQ ID NO: 4403 - DNA, 17 bp, synthetic construct
  source 1..17: mol_type = other DNA
cagctggtcctttcccc

SEQ ID NO: 4404 - DNA, 17 bp, synthetic construct
  source 1..17: mol_type = other DNA
ggggaaagggacagatg

SEQ ID NO: 4405 - DNA, 17 bp, synthetic construct
  source 1..17: mol_type = other DNA
catctgtccctttcccc

SEQ ID NO: 4406 - DNA, 17 bp, synthetic construct
  source 1..17: mol_type = other DNA
ggggaaagggacagctg

SEQ ID NO: 4407 - DNA, 17 bp, synthetic construct
  source 1..17: mol_type = other DNA
cagctgtccctttcccc

SEQ ID NO: 4408 - DNA, 17 bp, synthetic construct
  source 1..17: mol_type = other DNA
ggggaaagggccagatg

SEQ ID NO: 4409 - DNA, 17 bp, synthetic construct
  source 1..17: mol_type = other DNA
catctggccctttcccc

SEQ ID NO: 4410 - DNA, 17 bp, synthetic construct
  source 1..17: mol_type = other DNA
ggggaaagggccagctg

SEQ ID NO: 4411 - DNA, 17 bp, synthetic construct
  source 1..17: mol_type = other DNA
cagctggccctttcccc

SEQ ID NO: 4412 - DNA, 17 bp, synthetic construct
  source 1..17: mol_type = other DNA
ggggaagagaacagatg

SEQ ID NO: 4413 - DNA, 17 bp, synthetic construct
  source 1..17: mol_type = other DNA
catctgttctcttcccc

SEQ ID NO: 4414 - DNA, 17 bp, synthetic construct
  source 1..17: mol_type = other DNA
ggggaagagaacagctg

SEQ ID NO: 4415 - DNA, 17 bp, synthetic construct
  source 1..17: mol_type = other DNA
cagctgttctcttcccc

SEQ ID NO: 4416 - DNA, 17 bp, synthetic construct
  source 1..17: mol_type = other DNA
ggggaagagaccagatg

SEQ ID NO: 4417 - DNA, 17 bp, synthetic construct
  source 1..17: mol_type = other DNA
catctggtctcttcccc

SEQ ID NO: 4418 - DNA, 17 bp, synthetic construct
  source 1..17: mol_type = other DNA
ggggaagagaccagctg

SEQ ID NO: 4419 - DNA, 17 bp, synthetic construct
  source 1..17: mol_type = other DNA
cagctggtctcttcccc

SEQ ID NO: 4420 - DNA, 17 bp, synthetic construct
  source 1..17: mol_type = other DNA
ggggaagaggacagatg

SEQ ID NO: 4421 - DNA, 17 bp, synthetic construct
  source 1..17: mol_type = other DNA
catctgtcctcttcccc

SEQ ID NO: 4422 - DNA, 17 bp, synthetic construct
  source 1..17: mol_type = other DNA
ggggaagaggacagctg

SEQ ID NO: 4423 - DNA, 17 bp, synthetic construct
  source 1..17: mol_type = other DNA
cagctgtcctcttcccc

SEQ ID NO: 4424 - DNA, 17 bp, synthetic construct
  source 1..17: mol_type = other DNA
ggggaagaggccagatg

SEQ ID NO: 4425 - DNA, 17 bp, synthetic construct
  source 1..17: mol_type = other DNA
catctggcctcttcccc

SEQ ID NO: 4426 - DNA, 17 bp, synthetic construct
  source 1..17: mol_type = other DNA
ggggaagaggccagctg

SEQ ID NO: 4427 - DNA, 17 bp, synthetic construct
  source 1..17: mol_type = other DNA
cagctggcctcttcccc

SEQ ID NO: 4428 - DNA, 17 bp, synthetic construct
  source 1..17: mol_type = other DNA
ggggaagggaacagatg

SEQ ID NO: 4429 - DNA, 17 bp, synthetic construct
  source 1..17: mol_type = other DNA
catctgttcccttcccc

SEQ ID NO: 4430 - DNA, 17 bp, synthetic construct
  source 1..17: mol_type = other DNA
ggggaagggaacagctg

SEQ ID NO: 4431 - DNA, 17 bp, synthetic construct
  source 1..17: mol_type = other DNA
cagctgttcccttcccc

SEQ ID NO: 4432 - DNA, 17 bp, synthetic construct
  source 1..17: mol_type = other DNA
ggggaagggaccagatg

SEQ ID NO: 4433 - DNA, 17 bp, synthetic construct
  source 1..17: mol_type = other DNA
catctggtcccttcccc

SEQ ID NO: 4434 - DNA, 17 bp, synthetic construct
  source 1..17: mol_type = other DNA
ggggaagggaccagctg

SEQ ID NO: 4435 - DNA, 17 bp, synthetic construct
  source 1..17: mol_type = other DNA
cagctggtcccttcccc

SEQ ID NO: 4436 - DNA, 17 bp, synthetic construct
  source 1..17: mol_type = other DNA
ggggaaggggacagatg

SEQ ID NO: 4437 - DNA, 17 bp, synthetic construct
  source 1..17: mol_type = other DNA
catctgtccccttcccc

SEQ ID NO: 4438 - DNA, 17 bp, synthetic construct
  source 1..17: mol_type = other DNA
ggggaaggggacagctg

SEQ ID NO: 4439 - DNA, 17 bp, synthetic construct
  source 1..17: mol_type = other DNA
cagctgtccccttcccc

SEQ ID NO: 4440 - DNA, 17 bp, synthetic construct
  source 1..17: mol_type = other DNA
ggggaaggggccagatg

SEQ ID NO: 4441 - DNA, 17 bp, synthetic construct
  source 1..17: mol_type = other DNA
catctggccccttcccc

SEQ ID NO: 4442 - DNA, 17 bp, synthetic construct
  source 1..17: mol_type = other DNA
ggggaaggggccagctg

SEQ ID NO: 4443 - DNA, 17 bp, synthetic construct
  source 1..17: mol_type = other DNA
cagctggccccttcccc

SEQ ID NO: 4444 - DNA, 12 bp, synthetic construct
  source 1..12: mol_type = other DNA
accacgcccacc

SEQ ID NO: 4445 - DNA, 12 bp, synthetic construct
  source 1..12: mol_type = other DNA
ggtgggcgtggt

SEQ ID NO: 4446 - DNA, 12 bp, synthetic construct
  source 1..12: mol_type = other DNA
accacgcccact

SEQ ID NO: 4447 - DNA, 12 bp, synthetic construct
  source 1..12: mol_type = other DNA
agtgggcgtggt

SEQ ID NO: 4448 - DNA, 12 bp, synthetic construct
  source 1..12: mol_type = other DNA
accacgcccccc

SEQ ID NO: 4449 - DNA, 12 bp, synthetic construct
  source 1..12: mol_type = other DNA
ggggggcgtggt

SEQ ID NO: 4450 - DNA, 12 bp, synthetic construct
  source 1..12: mol_type = other DNA
accacgccccct

SEQ ID NO: 4451 - DNA, 12 bp, synthetic construct
  source 1..12: mol_type = other DNA
agggggcgtggt

SEQ ID NO: 4452 - DNA, 12 bp, synthetic construct
  source 1..12: mol_type = other DNA
gccacgcccacc

SEQ ID NO: 4453 - DNA, 12 bp, synthetic construct
  source 1..12: mol_type = other DNA
ggtgggcgtggc

SEQ ID NO: 4454 - DNA, 12 bp, synthetic construct
  source 1..12: mol_type = other DNA
gccacgcccact

SEQ ID NO: 4455 - DNA, 12 bp, synthetic construct
  source 1..12: mol_type = other DNA
agtgggcgtggc

SEQ ID NO: 4456 - DNA, 12 bp, synthetic construct
  source 1..12: mol_type = other DNA
gccacgcccccc

SEQ ID NO: 4457 - DNA, 12 bp, synthetic construct
  source 1..12: mol_type = other DNA
ggggggcgtggc

SEQ ID NO: 4458 - DNA, 12 bp, synthetic construct
  source 1..12: mol_type = other DNA
gccacgccccct

SEQ ID NO: 4459 - DNA, 12 bp, synthetic construct
  source 1..12: mol_type = other DNA
agggggcgtggc

SEQ ID NO: 4460 - DNA, 10 bp, synthetic construct
  source 1..10: mol_type = other DNA
gccatctgtt

SEQ ID NO: 4461 - DNA, 10 bp, synthetic construct
  source 1..10: mol_type = other DNA
aacagatggc

SEQ ID NO: 4462 - DNA, 18 bp, synthetic construct
  source 1..18: mol_type = other DNA
gctccgaggcttccagcc

SEQ ID NO: 4463 - DNA, 18 bp, synthetic construct
  source 1..18: mol_type = other DNA
ggctggaagcctcggagc

SEQ ID NO: 4464 - DNA, 18 bp, synthetic construct
  source 1..18: mol_type = other DNA
gctccgaggcttctagcc

SEQ ID NO: 4465 - DNA, 18 bp, synthetic construct
  source 1..18: mol_type = other DNA
ggctagaagcctcggagc

SEQ ID NO: 4466 - DNA, 18 bp, synthetic construct
  source 1..18: mol_type = other DNA
gctcccaggcttccagcc

SEQ ID NO: 4467 - DNA, 18 bp, synthetic construct
  source 1..18: mol_type = other DNA
ggctggaagcctgggagc

SEQ ID NO: 4468 - DNA, 18 bp, synthetic construct
  source 1..18: mol_type = other DNA
gctcccaggcttctagcc

SEQ ID NO: 4469 - DNA, 18 bp, synthetic construct
  source 1..18: mol_type = other DNA
ggctagaagcctgggagc

SEQ ID NO: 4470 - DNA, 10 bp, synthetic construct
  source 1..10: mol_type = other DNA
aaagaggtca

SEQ ID NO: 4471 - DNA, 10 bp, synthetic construct
  source 1..10: mol_type = other DNA
tgacctcttt

SEQ ID NO: 4472 - DNA, 10 bp, synthetic construct
  source 1..10: mol_type = other DNA
atagaggtca

SEQ ID NO: 4473 - DNA, 10 bp, synthetic construct
  source 1..10: mol_type = other DNA
tgacctctat

SEQ ID NO: 4474 - DNA, 12 bp, synthetic construct
  source 1..12: mol_type = other DNA
aggtgacagaca

SEQ ID NO: 4475 - DNA, 12 bp, synthetic construct
  source 1..12: mol_type = other DNA
tgtctgtcacct

SEQ ID NO: 4476 - DNA, 12 bp, synthetic construct
  source 1..12: mol_type = other DNA
aggtgccagaca

SEQ ID NO: 4477 - DNA, 12 bp, synthetic construct
  source 1..12: mol_type = other DNA
tgtctggcacct

SEQ ID NO: 4478 - DNA, 12 bp, synthetic construct
  source 1..12: mol_type = other DNA
aggtgtcagaca

SEQ ID NO: 4479 - DNA, 12 bp, synthetic construct
  source 1..12: mol_type = other DNA
tgtctgacacct

SEQ ID NO: 4480 - DNA, 11 bp, synthetic construct
  source 1..11: mol_type = other DNA
gtgaccttgaa

SEQ ID NO: 4481 - DNA, 11 bp, synthetic construct
  source 1..11: mol_type = other DNA
ttcaaggtcac

SEQ ID NO: 4482 - DNA, 11 bp, synthetic construct
  source 1..11: mol_type = other DNA
gtgaccttgac

SEQ ID NO: 4483 - DNA, 11 bp, synthetic construct
  source 1..11: mol_type = other DNA
gtcaaggtcac

SEQ ID NO: 4484 - DNA, 11 bp, synthetic construct
  source 1..11: mol_type = other DNA
gtgaccttgag

SEQ ID NO: 4485 - DNA, 11 bp, synthetic construct
  source 1..11: mol_type = other DNA
ctcaaggtcac

SEQ ID NO: 4486 - DNA, 11 bp, synthetic construct
  source 1..11: mol_type = other DNA
gtgaccttgga

SEQ ID NO: 4487 - DNA, 11 bp, synthetic construct
  source 1..11: mol_type = other DNA
tccaaggtcac

SEQ ID NO: 4488 - DNA, 11 bp, synthetic construct
  source 1..11: mol_type = other DNA
gtgaccttggc

SEQ ID NO: 4489 - DNA, 11 bp, synthetic construct
  source 1..11: mol_type = other DNA
gccaaggtcac

SEQ ID NO: 4490 - DNA, 11 bp, synthetic construct
  source 1..11: mol_type = other DNA
gtgaccttggg

SEQ ID NO: 4491 - DNA, 11 bp, synthetic construct
  source 1..11: mol_type = other DNA
cccaaggtcac

SEQ ID NO: 4492 - DNA, 12 bp, synthetic construct
  source 1..12: mol_type = other DNA
gctgagtcagca

SEQ ID NO: 4493 - DNA, 12 bp, synthetic construct
  source 1..12: mol_type = other DNA
tgctgactcagc

SEQ ID NO: 4494 - DNA, 12 bp, synthetic construct
  source 1..12: mol_type = other DNA
gctgactcagca

SEQ ID NO: 4495 - DNA, 12 bp, synthetic construct
  source 1..12: mol_type = other DNA
tgctgagtcagc

SEQ ID NO: 4496 - DNA, 24 bp, synthetic construct
  source 1..24: mol_type = other DNA
tatactgcaccccctcccatgaca

SEQ ID NO: 4497 - DNA, 24 bp, synthetic construct
  source 1..24: mol_type = other DNA
tgtcatgggagggggtgcagtata

SEQ ID NO: 4498 - DNA, 24 bp, synthetic construct
  source 1..24: mol_type = other DNA
tatactgcaccccctcccatgacc

SEQ ID NO: 4499 - DNA, 24 bp, synthetic construct
  source 1..24: mol_type = other DNA
ggtcatgggagggggtgcagtata

SEQ ID NO: 4500 - DNA, 24 bp, synthetic construct
  source 1..24: mol_type = other DNA
tatactgcaccccctcccatgtca

SEQ ID NO: 4501 - DNA, 24 bp, synthetic construct
  source 1..24: mol_type = other DNA
tgacatgggagggggtgcagtata

SEQ ID NO: 4502 - DNA, 24 bp, synthetic construct
  source 1..24: mol_type = other DNA
tatactgcaccccctcccatgtcc

SEQ ID NO: 4503 - DNA, 24 bp, synthetic construct
  source 1..24: mol_type = other DNA
ggacatgggagggggtgcagtata

SEQ ID NO: 4504 - DNA, 24 bp, synthetic construct
  source 1..24: mol_type = other DNA
tatactgcaccccttcccatgaca

SEQ ID NO: 4505 - DNA, 24 bp, synthetic construct
  source 1..24: mol_type = other DNA
tgtcatgggaaggggtgcagtata

SEQ ID NO: 4506 - DNA, 24 bp, synthetic construct
  source 1..24: mol_type = other DNA
tatactgcaccccttcccatgacc

SEQ ID NO: 4507 - DNA, 24 bp, synthetic construct
  source 1..24: mol_type = other DNA
ggtcatgggaaggggtgcagtata

SEQ ID NO: 4508 - DNA, 24 bp, synthetic construct
  source 1..24: mol_type = other DNA
tatactgcaccccttcccatgtca

SEQ ID NO: 4509 - DNA, 24 bp, synthetic construct
  source 1..24: mol_type = other DNA
tgacatgggaaggggtgcagtata

SEQ ID NO: 4510 - DNA, 24 bp, synthetic construct
  source 1..24: mol_type = other DNA
tatactgcaccccttcccatgtcc

SEQ ID NO: 4511 - DNA, 24 bp, synthetic construct
  source 1..24: mol_type = other DNA
ggacatgggaaggggtgcagtata

SEQ ID NO: 4512 - DNA, 24 bp, synthetic construct
  source 1..24: mol_type = other DNA
tatactgctccccctcccatgaca

SEQ ID NO: 4513 - DNA, 24 bp, synthetic construct
  source 1..24: mol_type = other DNA
tgtcatgggagggggagcagtata

SEQ ID NO: 4514 - DNA, 24 bp, synthetic construct
  source 1..24: mol_type = other DNA
tatactgctccccctcccatgacc

SEQ ID NO: 4515 - DNA, 24 bp, synthetic construct
  source 1..24: mol_type = other DNA
ggtcatgggagggggagcagtata

SEQ ID NO: 4516 - DNA, 24 bp, synthetic construct
  source 1..24: mol_type = other DNA
tatactgctccccctcccatgtca

SEQ ID NO: 4517 - DNA, 24 bp, synthetic construct
  source 1..24: mol_type = other DNA
tgacatgggagggggagcagtata

SEQ ID NO: 4518 - DNA, 24 bp, synthetic construct
  source 1..24: mol_type = other DNA
tatactgctccccctcccatgtcc

SEQ ID NO: 4519 - DNA, 24 bp, synthetic construct
  source 1..24: mol_type = other DNA
ggacatgggagggggagcagtata

SEQ ID NO: 4520 - DNA, 24 bp, synthetic construct
  source 1..24: mol_type = other DNA
tatactgctccccttcccatgaca

SEQ ID NO: 4521 - DNA, 24 bp, synthetic construct
  source 1..24: mol_type = other DNA
tgtcatgggaaggggagcagtata

SEQ ID NO: 4522 - DNA, 24 bp, synthetic construct
  source 1..24: mol_type = other DNA
tatactgctccccttcccatgacc

SEQ ID NO: 4523 - DNA, 24 bp, synthetic construct
  source 1..24: mol_type = other DNA
ggtcatgggaaggggagcagtata

SEQ ID NO: 4524 - DNA, 24 bp, synthetic construct
  source 1..24: mol_type = other DNA
tatactgctccccttcccatgtca

SEQ ID NO: 4525 - DNA, 24 bp, synthetic construct
  source 1..24: mol_type = other DNA
tgacatgggaaggggagcagtata

SEQ ID NO: 4526 - DNA, 24 bp, synthetic construct
  source 1..24: mol_type = other DNA
tatactgctccccttcccatgtcc

SEQ ID NO: 4527 - DNA, 24 bp, synthetic construct
  source 1..24: mol_type = other DNA
ggacatgggaaggggagcagtata

SEQ ID NO: 4528 - DNA, 24 bp, synthetic construct
  source 1..24: mol_type = other DNA
tatattgcaccccctcccatgaca

SEQ ID NO: 4529 - DNA, 24 bp, synthetic construct
  source 1..24: mol_type = other DNA
tgtcatgggagggggtgcaatata

SEQ ID NO: 4530 - DNA, 24 bp, synthetic construct
  source 1..24: mol_type = other DNA
tatattgcaccccctcccatgacc

SEQ ID NO: 4531 - DNA, 24 bp, synthetic construct
  source 1..24: mol_type = other DNA
ggtcatgggagggggtgcaatata

SEQ ID NO: 4532 - DNA, 24 bp, synthetic construct
  source 1..24: mol_type = other DNA
tatattgcaccccctcccatgtca

SEQ ID NO: 4533 - DNA, 24 bp, synthetic construct
  source 1..24: mol_type = other DNA
tgacatgggagggggtgcaatata

SEQ ID NO: 4534 - DNA, 24 bp, synthetic construct
  source 1..24: mol_type = other DNA
tatattgcaccccctcccatgtcc

SEQ ID NO: 4535 - DNA, 24 bp, synthetic construct
  source 1..24: mol_type = other DNA
ggacatgggagggggtgcaatata

SEQ ID NO: 4536 - DNA, 24 bp, synthetic construct
  source 1..24: mol_type = other DNA
tatattgcaccccttcccatgaca

SEQ ID NO: 4537 - DNA, 24 bp, synthetic construct
  source 1..24: mol_type = other DNA
tgtcatgggaaggggtgcaatata

SEQ ID NO: 4538 - DNA, 24 bp, synthetic construct
  source 1..24: mol_type = other DNA
tatattgcaccccttcccatgacc

SEQ ID NO: 4539 - DNA, 24 bp, synthetic construct
  source 1..24: mol_type = other DNA
ggtcatgggaaggggtgcaatata

SEQ ID NO: 4540 - DNA, 24 bp, synthetic construct
  source 1..24: mol_type = other DNA
tatattgcaccccttcccatgtca

SEQ ID NO: 4541 - DNA, 24 bp, synthetic construct
  source 1..24: mol_type = other DNA
tgacatgggaaggggtgcaatata

SEQ ID NO: 4542 - DNA, 24 bp, synthetic construct
  source 1..24: mol_type = other DNA
tatattgcaccccttcccatgtcc

SEQ ID NO: 4543 - DNA, 24 bp, synthetic construct
  source 1..24: mol_type = other DNA
ggacatgggaaggggtgcaatata

SEQ ID NO: 4544 - DNA, 24 bp, synthetic construct
  source 1..24: mol_type = other DNA
tatattgctccccctcccatgaca

SEQ ID NO: 4545 - DNA, 24 bp, synthetic construct
  source 1..24: mol_type = other DNA
tgtcatgggagggggagcaatata

SEQ ID NO: 4546 - DNA, 24 bp, synthetic construct
  source 1..24: mol_type = other DNA
tatattgctccccctcccatgacc

SEQ ID NO: 4547 - DNA, 24 bp, synthetic construct
  source 1..24: mol_type = other DNA
ggtcatgggagggggagcaatata

SEQ ID NO: 4548 - DNA, 24 bp, synthetic construct
  source 1..24: mol_type = other DNA
tatattgctccccctcccatgtca

SEQ ID NO: 4549 - DNA, 24 bp, synthetic construct
  source 1..24: mol_type = other DNA
tgacatgggagggggagcaatata

SEQ ID NO: 4550 - DNA, 24 bp, synthetic construct
  source 1..24: mol_type = other DNA
tatattgctccccctcccatgtcc

SEQ ID NO: 4551 - DNA, 24 bp, synthetic construct
  source 1..24: mol_type = other DNA
ggacatgggagggggagcaatata

SEQ ID NO: 4552 - DNA, 24 bp, synthetic construct
  source 1..24: mol_type = other DNA
tatattgctccccttcccatgaca

SEQ ID NO: 4553 - DNA, 24 bp, synthetic construct
  source 1..24: mol_type = other DNA
tgtcatgggaaggggagcaatata

SEQ ID NO: 4554 - DNA, 24 bp, synthetic construct
  source 1..24: mol_type = other DNA
tatattgctccccttcccatgacc

SEQ ID NO: 4555 - DNA, 24 bp, synthetic construct
  source 1..24: mol_type = other DNA
ggtcatgggaaggggagcaatata

SEQ ID NO: 4556 - DNA, 24 bp, synthetic construct
  source 1..24: mol_type = other DNA
tatattgctccccttcccatgtca

SEQ ID NO: 4557 - DNA, 24 bp, synthetic construct
  source 1..24: mol_type = other DNA
tgacatgggaaggggagcaatata

SEQ ID NO: 4558 - DNA, 24 bp, synthetic construct
  source 1..24: mol_type = other DNA
tatattgctccccttcccatgtcc

SEQ ID NO: 4559 - DNA, 24 bp, synthetic construct
  source 1..24: mol_type = other DNA
ggacatgggaaggggagcaatata

SEQ ID NO: 4560 - DNA, 24 bp, synthetic construct
  source 1..24: mol_type = other DNA
tgtactgcaccccctcccatgaca

SEQ ID NO: 4561 - DNA, 24 bp, synthetic construct
  source 1..24: mol_type = other DNA
tgtcatgggagggggtgcagtaca

SEQ ID NO: 4562 - DNA, 24 bp, synthetic construct
  source 1..24: mol_type = other DNA
tgtactgcaccccctcccatgacc

SEQ ID NO: 4563 - DNA, 24 bp, synthetic construct
  source 1..24: mol_type = other DNA
ggtcatgggagggggtgcagtaca

SEQ ID NO: 4564 - DNA, 24 bp, synthetic construct
  source 1..24: mol_type = other DNA
tgtactgcaccccctcccatgtca

SEQ ID NO: 4565 - DNA, 24 bp, synthetic construct
  source 1..24: mol_type = other DNA
tgacatgggagggggtgcagtaca

SEQ ID NO: 4566 - DNA, 24 bp, synthetic construct
  source 1..24: mol_type = other DNA
tgtactgcaccccctcccatgtcc

SEQ ID NO: 4567 - DNA, 24 bp, synthetic construct
  source 1..24: mol_type = other DNA
ggacatgggagggggtgcagtaca

SEQ ID NO: 4568 - DNA, 24 bp, synthetic construct
  source 1..24: mol_type = other DNA
tgtactgcaccccttcccatgaca

SEQ ID NO: 4569 - DNA, 24 bp, synthetic construct
  source 1..24: mol_type = other DNA
tgtcatgggaaggggtgcagtaca

SEQ ID NO: 4570 - DNA, 24 bp, synthetic construct
  source 1..24: mol_type = other DNA
tgtactgcaccccttcccatgacc

SEQ ID NO: 4571 - DNA, 24 bp, synthetic construct
  source 1..24: mol_type = other DNA
ggtcatgggaaggggtgcagtaca

SEQ ID NO: 4572 - DNA, 24 bp, synthetic construct
  source 1..24: mol_type = other DNA
tgtactgcaccccttcccatgtca

SEQ ID NO: 4573 - DNA, 24 bp, synthetic construct
  source 1..24: mol_type = other DNA
tgacatgggaaggggtgcagtaca

SEQ ID NO: 4574 - DNA, 24 bp, synthetic construct
  source 1..24: mol_type = other DNA
tgtactgcaccccttcccatgtcc

SEQ ID NO: 4575 - DNA, 24 bp, synthetic construct
  source 1..24: mol_type = other DNA
ggacatgggaaggggtgcagtaca

SEQ ID NO: 4576 - DNA, 24 bp, synthetic construct
  source 1..24: mol_type = other DNA
tgtactgctccccctcccatgaca

SEQ ID NO: 4577 - DNA, 24 bp, synthetic construct
  source 1..24: mol_type = other DNA
tgtcatgggagggggagcagtaca

SEQ ID NO: 4578 - DNA, 24 bp, synthetic construct
  source 1..24: mol_type = other DNA
tgtactgctccccctcccatgacc

SEQ ID NO: 4579 - DNA, 24 bp, synthetic construct
  source 1..24: mol_type = other DNA
ggtcatgggagggggagcagtaca

SEQ ID NO: 4580 - DNA, 24 bp, synthetic construct
  source 1..24: mol_type = other DNA
tgtactgctccccctcccatgtca

SEQ ID NO: 4581 - DNA, 24 bp, synthetic construct
  source 1..24: mol_type = other DNA
tgacatgggagggggagcagtaca

SEQ ID NO: 4582 - DNA, 24 bp, synthetic construct
  source 1..24: mol_type = other DNA
tgtactgctccccctcccatgtcc

SEQ ID NO: 4583 - DNA, 24 bp, synthetic construct
  source 1..24: mol_type = other DNA
ggacatgggagggggagcagtaca

SEQ ID NO: 4584 - DNA, 24 bp, synthetic construct
  source 1..24: mol_type = other DNA
tgtactgctccccttcccatgaca

SEQ ID NO: 4585 - DNA, 24 bp, synthetic construct
  source 1..24: mol_type = other DNA
tgtcatgggaaggggagcagtaca

SEQ ID NO: 4586 - DNA, 24 bp, synthetic construct
  source 1..24: mol_type = other DNA
tgtactgctccccttcccatgacc

SEQ ID NO: 4587 - DNA, 24 bp, synthetic construct
  source 1..24: mol_type = other DNA
ggtcatgggaaggggagcagtaca

SEQ ID NO: 4588 - DNA, 24 bp, synthetic construct
  source 1..24: mol_type = other DNA
tgtactgctccccttcccatgtca

SEQ ID NO: 4589 - DNA, 24 bp, synthetic construct
  source 1..24: mol_type = other DNA
tgacatgggaaggggagcagtaca

SEQ ID NO: 4590 - DNA, 24 bp, synthetic construct
  source 1..24: mol_type = other DNA
tgtactgctccccttcccatgtcc

SEQ ID NO: 4591 - DNA, 24 bp, synthetic construct
  source 1..24: mol_type = other DNA
ggacatgggaaggggagcagtaca

SEQ ID NO: 4592 - DNA, 24 bp, synthetic construct
  source 1..24: mol_type = other DNA
tgtattgcaccccctcccatgaca

SEQ ID NO: 4593 - DNA, 24 bp, synthetic construct
  source 1..24: mol_type = other DNA
tgtcatgggagggggtgcaataca

SEQ ID NO: 4594 - DNA, 24 bp, synthetic construct
  source 1..24: mol_type = other DNA
tgtattgcaccccctcccatgacc

SEQ ID NO: 4595 - DNA, 24 bp, synthetic construct
  source 1..24: mol_type = other DNA
ggtcatgggagggggtgcaataca

SEQ ID NO: 4596 - DNA, 24 bp, synthetic construct
  source 1..24: mol_type = other DNA
tgtattgcaccccctcccatgtca

SEQ ID NO: 4597 - DNA, 24 bp, synthetic construct
  source 1..24: mol_type = other DNA
tgacatgggagggggtgcaataca

SEQ ID NO: 4598 - DNA, 24 bp, synthetic construct
  source 1..24: mol_type = other DNA
tgtattgcaccccctcccatgtcc

SEQ ID NO: 4599 - DNA, 24 bp, synthetic construct
  source 1..24: mol_type = other DNA
ggacatgggagggggtgcaataca

SEQ ID NO: 4600 - DNA, 24 bp, synthetic construct
  source 1..24: mol_type = other DNA
tgtattgcaccccttcccatgaca

SEQ ID NO: 4601 - DNA, 24 bp, synthetic construct
  source 1..24: mol_type = other DNA
tgtcatgggaaggggtgcaataca

SEQ ID NO: 4602 - DNA, 24 bp, synthetic construct
  source 1..24: mol_type = other DNA
tgtattgcaccccttcccatgacc

SEQ ID NO: 4603 - DNA, 24 bp, synthetic construct
  source 1..24: mol_type = other DNA
ggtcatgggaaggggtgcaataca

SEQ ID NO: 4604 - DNA, 24 bp, synthetic construct
  source 1..24: mol_type = other DNA
tgtattgcaccccttcccatgtca

SEQ ID NO: 4605 - DNA, 24 bp, synthetic construct
  source 1..24: mol_type = other DNA
tgacatgggaaggggtgcaataca

SEQ ID NO: 4606 - DNA, 24 bp, synthetic construct
  source 1..24: mol_type = other DNA
tgtattgcaccccttcccatgtcc

SEQ ID NO: 4607 - DNA, 24 bp, synthetic construct
  source 1..24: mol_type = other DNA
ggacatgggaaggggtgcaataca

SEQ ID NO: 4608 - DNA, 24 bp, synthetic construct
  source 1..24: mol_type = other DNA
tgtattgctccccctcccatgaca

SEQ ID NO: 4609 - DNA, 24 bp, synthetic construct
  source 1..24: mol_type = other DNA
tgtcatgggagggggagcaataca

SEQ ID NO: 4610 - DNA, 24 bp, synthetic construct
  source 1..24: mol_type = other DNA
tgtattgctccccctcccatgacc

SEQ ID NO: 4611 - DNA, 24 bp, synthetic construct
  source 1..24: mol_type = other DNA
ggtcatgggagggggagcaataca

SEQ ID NO: 4612 - DNA, 24 bp, synthetic construct
  source 1..24: mol_type = other DNA
tgtattgctccccctcccatgtca

SEQ ID NO: 4613 - DNA, 24 bp, synthetic construct
  source 1..24: mol_type = other DNA
tgacatgggagggggagcaataca

SEQ ID NO: 4614 - DNA, 24 bp, synthetic construct
  source 1..24: mol_type = other DNA
tgtattgctccccctcccatgtcc

SEQ ID NO: 4615 - DNA, 24 bp, synthetic construct
  source 1..24: mol_type = other DNA
ggacatgggagggggagcaataca

SEQ ID NO: 4616 - DNA, 24 bp, synthetic construct
  source 1..24: mol_type = other DNA
tgtattgctccccttcccatgaca

SEQ ID NO: 4617 - DNA, 24 bp, synthetic construct
  source 1..24: mol_type = other DNA
tgtcatgggaaggggagcaataca

SEQ ID NO: 4618 - DNA, 24 bp, synthetic construct
  source 1..24: mol_type = other DNA
tgtattgctccccttcccatgacc

SEQ ID NO: 4619 - DNA, 24 bp, synthetic construct
  source 1..24: mol_type = other DNA
ggtcatgggaaggggagcaataca

SEQ ID NO: 4620 - DNA, 24 bp, synthetic construct
  source 1..24: mol_type = other DNA
tgtattgctccccttcccatgtca

SEQ ID NO: 4621 - DNA, 24 bp, synthetic construct
  source 1..24: mol_type = other DNA
tgacatgggaaggggagcaataca

SEQ ID NO: 4622 - DNA, 24 bp, synthetic construct
  source 1..24: mol_type = other DNA
tgtattgctccccttcccatgtcc

SEQ ID NO: 4623 - DNA, 24 bp, synthetic construct
  source 1..24: mol_type = other DNA
ggacatgggaaggggagcaataca

SEQ ID NO: 4624 - DNA, 12 bp, synthetic construct
  source 1..12: mol_type = other DNA
gcctgagggcaa

SEQ ID NO: 4625 - DNA, 12 bp, synthetic construct
  source 1..12: mol_type = other DNA
ttgccctcaggc

SEQ ID NO: 4626 - DNA, 12 bp, synthetic construct
  source 1..12: mol_type = other DNA
gcctgagggcat

SEQ ID NO: 4627 - DNA, 12 bp, synthetic construct
  source 1..12: mol_type = other DNA
atgccctcaggc

SEQ ID NO: 4628 - DNA, 12 bp, synthetic construct
  source 1..12: mol_type = other DNA
gcctgaggccaa

SEQ ID NO: 4629 - DNA, 12 bp, synthetic construct
  source 1..12: mol_type = other DNA
ttggcctcaggc

SEQ ID NO: 4630 - DNA, 12 bp, synthetic construct
  source 1..12: mol_type = other DNA
gcctgaggccat

SEQ ID NO: 4631 - DNA, 12 bp, synthetic construct
  source 1..12: mol_type = other DNA
atggcctcaggc

SEQ ID NO: 4632 - DNA, 12 bp, synthetic construct
  source 1..12: mol_type = other DNA
gcctcagggcaa

SEQ ID NO: 4633 - DNA, 12 bp, synthetic construct
  source 1..12: mol_type = other DNA
ttgccctgaggc

SEQ ID NO: 4634 - DNA, 12 bp, synthetic construct
  source 1..12: mol_type = other DNA
gcctcagggcat

SEQ ID NO: 4635 - DNA, 12 bp, synthetic construct
  source 1..12: mol_type = other DNA
atgccctgaggc

SEQ ID NO: 4636 - DNA, 12 bp, synthetic construct
  source 1..12: mol_type = other DNA
gcctcaggccaa

SEQ ID NO: 4637 - DNA, 12 bp, synthetic construct
  source 1..12: mol_type = other DNA
ttggcctgaggc

SEQ ID NO: 4638 - DNA, 12 bp, synthetic construct
  source 1..12: mol_type = other DNA
gcctcaggccat

SEQ ID NO: 4639 - DNA, 12 bp, synthetic construct
  source 1..12: mol_type = other DNA
atggcctgaggc

SEQ ID NO: 4640 - DNA, 12 bp, synthetic construct
  source 1..12: mol_type = other DNA
ccctgagggcaa

SEQ ID NO: 4641 - DNA, 12 bp, synthetic construct
  source 1..12: mol_type = other DNA
ttgccctcaggg

SEQ ID NO: 4642 - DNA, 12 bp, synthetic construct
  source 1..12: mol_type = other DNA
ccctgagggcat

SEQ ID NO: 4643 - DNA, 12 bp, synthetic construct
  source 1..12: mol_type = other DNA
atgccctcaggg

SEQ ID NO: 4644 - DNA, 12 bp, synthetic construct
  source 1..12: mol_type = other DNA
ccctgaggccaa

SEQ ID NO: 4645 - DNA, 12 bp, synthetic construct
  source 1..12: mol_type = other DNA
ttggcctcaggg

SEQ ID NO: 4646 - DNA, 12 bp, synthetic construct
  source 1..12: mol_type = other DNA
ccctgaggccat

SEQ ID NO: 4647 - DNA, 12 bp, synthetic construct
  source 1..12: mol_type = other DNA
atggcctcaggg

SEQ ID NO: 4648 - DNA, 12 bp, synthetic construct
  source 1..12: mol_type = other DNA
ccctcagggcaa

SEQ ID NO: 4649 - DNA, 12 bp, synthetic construct
  source 1..12: mol_type = other DNA
ttgccctgaggg

SEQ ID NO: 4650 - DNA, 12 bp, synthetic construct
  source 1..12: mol_type = other DNA
ccctcagggcat

SEQ ID NO: 4651 - DNA, 12 bp, synthetic construct
  source 1..12: mol_type = other DNA
atgccctgaggg

SEQ ID NO: 4652 - DNA, 12 bp, synthetic construct
  source 1..12: mol_type = other DNA
ccctcaggccaa

SEQ ID NO: 4653 - DNA, 12 bp, synthetic construct
  source 1..12: mol_type = other DNA
ttggcctgaggg

SEQ ID NO: 4654 - DNA, 12 bp, synthetic construct
  source 1..12: mol_type = other DNA
ccctcaggccat

SEQ ID NO: 4655 - DNA, 12 bp, synthetic construct
  source 1..12: mol_type = other DNA
atggcctgaggg

SEQ ID NO: 4656 - DNA, 18 bp, synthetic construct
  source 1..18: mol_type = other DNA
aacatgaaaaaccatgta

SEQ ID NO: 4657 - DNA, 18 bp, synthetic construct
  source 1..18: mol_type = other DNA
tacatggtttttcatgtt

SEQ ID NO: 4658 - DNA, 18 bp, synthetic construct
  source 1..18: mol_type = other DNA
aacatgaaaaaccatgtt

SEQ ID NO: 4659 - DNA, 18 bp, synthetic construct
  source 1..18: mol_type = other DNA
aacatggtttttcatgtt

SEQ ID NO: 4660 - DNA, 18 bp, synthetic construct
  source 1..18: mol_type = other DNA
aacatgaaaatccatgta

SEQ ID NO: 4661 - DNA, 18 bp, synthetic construct
  source 1..18: mol_type = other DNA
tacatggattttcatgtt

SEQ ID NO: 4662 - DNA, 18 bp, synthetic construct
  source 1..18: mol_type = other DNA
aacatgaaaatccatgtt

SEQ ID NO: 4663 - DNA, 18 bp, synthetic construct
  source 1..18: mol_type = other DNA
aacatggattttcatgtt

SEQ ID NO: 4664 - DNA, 18 bp, synthetic construct
  source 1..18: mol_type = other DNA
aacatgaaataccatgta

SEQ ID NO: 4665 - DNA, 18 bp, synthetic construct
  source 1..18: mol_type = other DNA
tacatggtatttcatgtt

SEQ ID NO: 4666 - DNA, 18 bp, synthetic construct
  source 1..18: mol_type = other DNA
aacatgaaataccatgtt

SEQ ID NO: 4667 - DNA, 18 bp, synthetic construct
  source 1..18: mol_type = other DNA
aacatggtatttcatgtt

SEQ ID NO: 4668 - DNA, 18 bp, synthetic construct
  source 1..18: mol_type = other DNA
aacatgaaattccatgta

SEQ ID NO: 4669 - DNA, 18 bp, synthetic construct
  source 1..18: mol_type = other DNA
tacatggaatttcatgtt

SEQ ID NO: 4670 - DNA, 18 bp, synthetic construct
  source 1..18: mol_type = other DNA
aacatgaaattccatgtt

SEQ ID NO: 4671 - DNA, 18 bp, synthetic construct
  source 1..18: mol_type = other DNA
aacatggaatttcatgtt

SEQ ID NO: 4672 - DNA, 18 bp, synthetic construct
  source 1..18: mol_type = other DNA
aacatgaataaccatgta

SEQ ID NO: 4673 - DNA, 18 bp, synthetic construct
  source 1..18: mol_type = other DNA
tacatggttattcatgtt

SEQ ID NO: 4674 - DNA, 18 bp, synthetic construct
  source 1..18: mol_type = other DNA
aacatgaataaccatgtt

SEQ ID NO: 4675 - DNA, 18 bp, synthetic construct
  source 1..18: mol_type = other DNA
aacatggttattcatgtt

SEQ ID NO: 4676 - DNA, 18 bp, synthetic construct
  source 1..18: mol_type = other DNA
aacatgaatatccatgta

SEQ ID NO: 4677 - DNA, 18 bp, synthetic construct
  source 1..18: mol_type = other DNA
tacatggatattcatgtt

SEQ ID NO: 4678 - DNA, 18 bp, synthetic construct
  source 1..18: mol_type = other DNA
aacatgaatatccatgtt

SEQ ID NO: 4679 - DNA, 18 bp, synthetic construct
  source 1..18: mol_type = other DNA
aacatggatattcatgtt

SEQ ID NO: 4680 - DNA, 18 bp, synthetic construct
  source 1..18: mol_type = other DNA
aacatgaattaccatgta

SEQ ID NO: 4681 - DNA, 18 bp, synthetic construct
  source 1..18: mol_type = other DNA
tacatggtaattcatgtt

SEQ ID NO: 4682 - DNA, 18 bp, synthetic construct
  source 1..18: mol_type = other DNA
aacatgaattaccatgtt

SEQ ID NO: 4683 - DNA, 18 bp, synthetic construct
  source 1..18: mol_type = other DNA
aacatggtaattcatgtt

SEQ ID NO: 4684 - DNA, 18 bp, synthetic construct
  source 1..18: mol_type = other DNA
aacatgaatttccatgta

SEQ ID NO: 4685 - DNA, 18 bp, synthetic construct
  source 1..18: mol_type = other DNA
tacatggaaattcatgtt

SEQ ID NO: 4686 - DNA, 18 bp, synthetic construct
  source 1..18: mol_type = other DNA
aacatgaatttccatgtt

SEQ ID NO: 4687 - DNA, 18 bp, synthetic construct
  source 1..18: mol_type = other DNA
aacatggaaattcatgtt

SEQ ID NO: 4688 - DNA, 18 bp, synthetic construct
  source 1..18: mol_type = other DNA
aacatgataaaccatgta

SEQ ID NO: 4689 - DNA, 18 bp, synthetic construct
  source 1..18: mol_type = other DNA
tacatggtttatcatgtt

SEQ ID NO: 4690 - DNA, 18 bp, synthetic construct
  source 1..18: mol_type = other DNA
aacatgataaaccatgtt

SEQ ID NO: 4691 - DNA, 18 bp, synthetic construct
  source 1..18: mol_type = other DNA
aacatggtttatcatgtt

SEQ ID NO: 4692 - DNA, 18 bp, synthetic construct
  source 1..18: mol_type = other DNA
aacatgataatccatgta

SEQ ID NO: 4693 - DNA, 18 bp, synthetic construct
  source 1..18: mol_type = other DNA
tacatggattatcatgtt

SEQ ID NO: 4694 - DNA, 18 bp, synthetic construct
  source 1..18: mol_type = other DNA
aacatgataatccatgtt

SEQ ID NO: 4695 - DNA, 18 bp, synthetic construct
  source 1..18: mol_type = other DNA
aacatggattatcatgtt

SEQ ID NO: 4696 - DNA, 18 bp, synthetic construct
  source 1..18: mol_type = other DNA
aacatgatataccatgta

SEQ ID NO: 4697 - DNA, 18 bp, synthetic construct
  source 1..18: mol_type = other DNA
tacatggtatatcatgtt

SEQ ID NO: 4698 - DNA, 18 bp, synthetic construct
  source 1..18: mol_type = other DNA
aacatgatataccatgtt

SEQ ID NO: 4699 - DNA, 18 bp, synthetic construct
  source 1..18: mol_type = other DNA
aacatggtatatcatgtt

SEQ ID NO: 4700 - DNA, 18 bp, synthetic construct
  source 1..18: mol_type = other DNA
aacatgatattccatgta

SEQ ID NO: 4701 - DNA, 18 bp, synthetic construct
  source 1..18: mol_type = other DNA
tacatggaatatcatgtt

SEQ ID NO: 4702 - DNA, 18 bp, synthetic construct
  source 1..18: mol_type = other DNA
aacatgatattccatgtt

SEQ ID NO: 4703 - DNA, 18 bp, synthetic construct
  source 1..18: mol_type = other DNA
aacatggaatatcatgtt

SEQ ID NO: 4704 - DNA, 18 bp, synthetic construct
  source 1..18: mol_type = other DNA
aacatgattaaccatgta

SEQ ID NO: 4705 - DNA, 18 bp, synthetic construct
  source 1..18: mol_type = other DNA
tacatggttaatcatgtt

SEQ ID NO: 4706 - DNA, 18 bp, synthetic construct
  source 1..18: mol_type = other DNA
aacatgattaaccatgtt

SEQ ID NO: 4707 - DNA, 18 bp, synthetic construct
  source 1..18: mol_type = other DNA
aacatggttaatcatgtt

SEQ ID NO: 4708 - DNA, 18 bp, synthetic construct
  source 1..18: mol_type = other DNA
aacatgattatccatgta

SEQ ID NO: 4709 - DNA, 18 bp, synthetic construct
  source 1..18: mol_type = other DNA
tacatggataatcatgtt

SEQ ID NO: 4710 - DNA, 18 bp, synthetic construct
  source 1..18: mol_type = other DNA
aacatgattatccatgtt

SEQ ID NO: 4711 - DNA, 18 bp, synthetic construct
  source 1..18: mol_type = other DNA
aacatggataatcatgtt

SEQ ID NO: 4712 - DNA, 18 bp, synthetic construct
  source 1..18: mol_type = other DNA
aacatgatttaccatgta

SEQ ID NO: 4713 - DNA, 18 bp, synthetic construct
  source 1..18: mol_type = other DNA
tacatggtaaatcatgtt

SEQ ID NO: 4714 - DNA, 18 bp, synthetic construct
  source 1..18: mol_type = other DNA
aacatgatttaccatgtt

SEQ ID NO: 4715 - DNA, 18 bp, synthetic construct
  source 1..18: mol_type = other DNA
aacatggtaaatcatgtt

SEQ ID NO: 4716 - DNA, 18 bp, synthetic construct
  source 1..18: mol_type = other DNA
aacatgattttccatgta

SEQ ID NO: 4717 - DNA, 18 bp, synthetic construct
  source 1..18: mol_type = other DNA
tacatggaaaatcatgtt

SEQ ID NO: 4718 - DNA, 18 bp, synthetic construct
  source 1..18: mol_type = other DNA
aacatgattttccatgtt

SEQ ID NO: 4719 - DNA, 18 bp, synthetic construct
  source 1..18: mol_type = other DNA
aacatggaaaatcatgtt

SEQ ID NO: 4720 - DNA, 18 bp, synthetic construct
  source 1..18: mol_type = other DNA
tacatgaaaaaccatgta

SEQ ID NO: 4721 - DNA, 18 bp, synthetic construct
  source 1..18: mol_type = other DNA
tacatggtttttcatgta

SEQ ID NO: 4722 - DNA, 18 bp, synthetic construct
  source 1..18: mol_type = other DNA
tacatgaaaaaccatgtt

SEQ ID NO: 4723 - DNA, 18 bp, synthetic construct
  source 1..18: mol_type = other DNA
aacatggtttttcatgta

SEQ ID NO: 4724 - DNA, 18 bp, synthetic construct
  source 1..18: mol_type = other DNA
tacatgaaaatccatgta

SEQ ID NO: 4725 - DNA, 18 bp, synthetic construct
  source 1..18: mol_type = other DNA
tacatggattttcatgta

SEQ ID NO: 4726 - DNA, 18 bp, synthetic construct
  source 1..18: mol_type = other DNA
tacatgaaaatccatgtt

SEQ ID NO: 4727 - DNA, 18 bp, synthetic construct
  source 1..18: mol_type = other DNA
aacatggattttcatgta

SEQ ID NO: 4728 - DNA, 18 bp, synthetic construct
  source 1..18: mol_type = other DNA
tacatgaaataccatgta

SEQ ID NO: 4729 - DNA, 18 bp, synthetic construct
  source 1..18: mol_type = other DNA
tacatggtatttcatgta

SEQ ID NO: 4730 - DNA, 18 bp, synthetic construct
  source 1..18: mol_type = other DNA
tacatgaaataccatgtt

SEQ ID NO: 4731 - DNA, 18 bp, synthetic construct
  source 1..18: mol_type = other DNA
aacatggtatttcatgta

SEQ ID NO: 4732 - DNA, 18 bp, synthetic construct
  source 1..18: mol_type = other DNA
tacatgaaattccatgta

SEQ ID NO: 4733 - DNA, 18 bp, synthetic construct
  source 1..18: mol_type = other DNA
tacatggaatttcatgta

SEQ ID NO: 4734 - DNA, 18 bp, synthetic construct
  source 1..18: mol_type = other DNA
tacatgaaattccatgtt

SEQ ID NO: 4735 - DNA, 18 bp, synthetic construct
  source 1..18: mol_type = other DNA
aacatggaatttcatgta

SEQ ID NO: 4736 - DNA, 18 bp, synthetic construct
  source 1..18: mol_type = other DNA
tacatgaataaccatgta

SEQ ID NO: 4737 - DNA, 18 bp, synthetic construct
  source 1..18: mol_type = other DNA
tacatggttattcatgta

SEQ ID NO: 4738 - DNA, 18 bp, synthetic construct
  source 1..18: mol_type = other DNA
tacatgaataaccatgtt

SEQ ID NO: 4739 - DNA, 18 bp, synthetic construct
  source 1..18: mol_type = other DNA
aacatggttattcatgta

SEQ ID NO: 4740 - DNA, 18 bp, synthetic construct
  source 1..18: mol_type = other DNA
tacatgaatatccatgta

SEQ ID NO: 4741 - DNA, 18 bp, synthetic construct
  source 1..18: mol_type = other DNA
tacatggatattcatgta

SEQ ID NO: 4742 - DNA, 18 bp, synthetic construct
  source 1..18: mol_type = other DNA
tacatgaatatccatgtt

SEQ ID NO: 4743 - DNA, 18 bp, synthetic construct
  source 1..18: mol_type = other DNA
aacatggatattcatgta

SEQ ID NO: 4744 - DNA, 18 bp, synthetic construct
  source 1..18: mol_type = other DNA
tacatgaattaccatgta

SEQ ID NO: 4745 - DNA, 18 bp, synthetic construct
  source 1..18: mol_type = other DNA
tacatggtaattcatgta

SEQ ID NO: 4746 - DNA, 18 bp, synthetic construct
  source 1..18: mol_type = other DNA
tacatgaattaccatgtt

SEQ ID NO: 4747 - DNA, 18 bp, synthetic construct
  source 1..18: mol_type = other DNA
aacatggtaattcatgta

SEQ ID NO: 4748 - DNA, 18 bp, synthetic construct
  source 1..18: mol_type = other DNA
tacatgaatttccatgta

SEQ ID NO: 4749 - DNA, 18 bp, synthetic construct
  source 1..18: mol_type = other DNA
tacatggaaattcatgta

SEQ ID NO: 4750 - DNA, 18 bp, synthetic construct
  source 1..18: mol_type = other DNA
tacatgaatttccatgtt

SEQ ID NO: 4751 - DNA, 18 bp, synthetic construct
  source 1..18: mol_type = other DNA
aacatggaaattcatgta

SEQ ID NO: 4752 - DNA, 18 bp, synthetic construct
  source 1..18: mol_type = other DNA
tacatgataaaccatgta

SEQ ID NO: 4753 - DNA, 18 bp, synthetic construct
  source 1..18: mol_type = other DNA
tacatggtttatcatgta

SEQ ID NO: 4754 - DNA, 18 bp, synthetic construct
  source 1..18: mol_type = other DNA
tacatgataaaccatgtt

SEQ ID NO: 4755 - DNA, 18 bp, synthetic construct
  source 1..18: mol_type = other DNA
aacatggtttatcatgta

SEQ ID NO: 4756 - DNA, 18 bp, synthetic construct
  source 1..18: mol_type = other DNA
tacatgataatccatgta

SEQ ID NO: 4757 - DNA, 18 bp, synthetic construct
  source 1..18: mol_type = other DNA
tacatggattatcatgta

SEQ ID NO: 4758 - DNA, 18 bp, synthetic construct
  source 1..18: mol_type = other DNA
tacatgataatccatgtt

SEQ ID NO: 4759 - DNA, 18 bp, synthetic construct
  source 1..18: mol_type = other DNA
aacatggattatcatgta

SEQ ID NO: 4760 - DNA, 18 bp, synthetic construct
  source 1..18: mol_type = other DNA
tacatgatataccatgta

SEQ ID NO: 4761 - DNA, 18 bp, synthetic construct
  source 1..18: mol_type = other DNA
tacatggtatatcatgta

SEQ ID NO: 4762 - DNA, 18 bp, synthetic construct
  source 1..18: mol_type = other DNA
tacatgatataccatgtt

SEQ ID NO: 4763 - DNA, 18 bp, synthetic construct
  source 1..18: mol_type = other DNA
aacatggtatatcatgta

SEQ ID NO: 4764 - DNA, 18 bp, synthetic construct
  source 1..18: mol_type = other DNA
tacatgatattccatgta

SEQ ID NO: 4765 - DNA, 18 bp, synthetic construct
  source 1..18: mol_type = other DNA
tacatggaatatcatgta

SEQ ID NO: 4766 - DNA, 18 bp, synthetic construct
  source 1..18: mol_type = other DNA
tacatgatattccatgtt

SEQ ID NO: 4767 - DNA, 18 bp, synthetic construct
  source 1..18: mol_type = other DNA
aacatggaatatcatgta

SEQ ID NO: 4768 - DNA, 18 bp, synthetic construct
  source 1..18: mol_type = other DNA
tacatgattaaccatgta

SEQ ID NO: 4769 - DNA, 18 bp, synthetic construct
  source 1..18: mol_type = other DNA
tacatggttaatcatgta

SEQ ID NO: 4770 - DNA, 18 bp, synthetic construct
  source 1..18: mol_type = other DNA
tacatgattaaccatgtt

SEQ ID NO: 4771 - DNA, 18 bp, synthetic construct
  source 1..18: mol_type = other DNA
aacatggttaatcatgta

SEQ ID NO: 4772 - DNA, 18 bp, synthetic construct
  source 1..18: mol_type = other DNA
tacatgattatccatgta

SEQ ID NO: 4773 - DNA, 18 bp, synthetic construct
  source 1..18: mol_type = other DNA
tacatggataatcatgta

SEQ ID NO: 4774 - DNA, 18 bp, synthetic construct
  source 1..18: mol_type = other DNA
tacatgattatccatgtt

SEQ ID NO: 4775 - DNA, 18 bp, synthetic construct
  source 1..18: mol_type = other DNA
aacatggataatcatgta

SEQ ID NO: 4776 - DNA, 18 bp, synthetic construct
  source 1..18: mol_type = other DNA
tacatgatttaccatgta

SEQ ID NO: 4777 - DNA, 18 bp, synthetic construct
  source 1..18: mol_type = other DNA
tacatggtaaatcatgta

SEQ ID NO: 4778 - DNA, 18 bp, synthetic construct
  source 1..18: mol_type = other DNA
tacatgatttaccatgtt

SEQ ID NO: 4779 - DNA, 18 bp, synthetic construct
  source 1..18: mol_type = other DNA
aacatggtaaatcatgta

SEQ ID NO: 4780 - DNA, 18 bp, synthetic construct
  source 1..18: mol_type = other DNA
tacatgattttccatgta

SEQ ID NO: 4781 - DNA, 18 bp, synthetic construct
  source 1..18: mol_type = other DNA
tacatggaaaatcatgta

SEQ ID NO: 4782 - DNA, 18 bp, synthetic construct
  source 1..18: mol_type = other DNA
tacatgattttccatgtt

SEQ ID NO: 4783 - DNA, 18 bp, synthetic construct
  source 1..18: mol_type = other DNA
aacatggaaaatcatgta

SEQ ID NO: 4784 - DNA, 13 bp, synthetic construct
  source 1..13: mol_type = other DNA
agtttcattttcc

SEQ ID NO: 4785 - DNA, 13 bp, synthetic construct
  source 1..13: mol_type = other DNA
ggaaaatgaaact

SEQ ID NO: 4786 - DNA, 13 bp, synthetic construct
  source 1..13: mol_type = other DNA
agtttcattttct

SEQ ID NO: 4787 - DNA, 13 bp, synthetic construct
  source 1..13: mol_type = other DNA
agaaaatgaaact

SEQ ID NO: 4788 - DNA, 13 bp, synthetic construct
  source 1..13: mol_type = other DNA
agtttcgttttcc

SEQ ID NO: 4789 - DNA, 13 bp, synthetic construct
  source 1..13: mol_type = other DNA
ggaaaacgaaact

SEQ ID NO: 4790 - DNA, 13 bp, synthetic construct
  source 1..13: mol_type = other DNA
agtttcgttttct

SEQ ID NO: 4791 - DNA, 13 bp, synthetic construct
  source 1..13: mol_type = other DNA
agaaaacgaaact

SEQ ID NO: 4792 - DNA, 12 bp, synthetic construct
  source 1..12: mol_type = other DNA
gaaagtgaaagt

SEQ ID NO: 4793 - DNA, 12 bp, synthetic construct
  source 1..12: mol_type = other DNA
actttcactttc

SEQ ID NO: 4794 - DNA, 12 bp, synthetic construct
  source 1..12: mol_type = other DNA
gaaagtgaaact

SEQ ID NO: 4795 - DNA, 12 bp, synthetic construct
  source 1..12: mol_type = other DNA
agtttcactttc

SEQ ID NO: 4796 - DNA, 12 bp, synthetic construct
  source 1..12: mol_type = other DNA
gaaactgaaagt

SEQ ID NO: 4797 - DNA, 12 bp, synthetic construct
  source 1..12: mol_type = other DNA
actttcagtttc

SEQ ID NO: 4798 - DNA, 12 bp, synthetic construct
  source 1..12: mol_type = other DNA
gaaactgaaact

SEQ ID NO: 4799 - DNA, 12 bp, synthetic construct
  source 1..12: mol_type = other DNA
agtttcagtttc

SEQ ID NO: 4800 - DNA, 12 bp, synthetic construct
  source 1..12: mol_type = other DNA
ggaagtgaaagt

SEQ ID NO: 4801 - DNA, 12 bp, synthetic construct
  source 1..12: mol_type = other DNA
actttcacttcc

SEQ ID NO: 4802 - DNA, 12 bp, synthetic construct
  source 1..12: mol_type = other DNA
ggaagtgaaact

SEQ ID NO: 4803 - DNA, 12 bp, synthetic construct
  source 1..12: mol_type = other DNA
agtttcacttcc

SEQ ID NO: 4804 - DNA, 12 bp, synthetic construct
  source 1..12: mol_type = other DNA
ggaactgaaagt

SEQ ID NO: 4805 - DNA, 12 bp, synthetic construct
  source 1..12: mol_type = other DNA
actttcagttcc

SEQ ID NO: 4806 - DNA, 12 bp, synthetic construct
  source 1..12: mol_type = other DNA
ggaactgaaact

SEQ ID NO: 4807 - DNA, 12 bp, synthetic construct
  source 1..12: mol_type = other DNA
agtttcagttcc

SEQ ID NO: 4808 - DNA, 10 bp, synthetic construct
  source 1..10: mol_type = other DNA
attttccatt

SEQ ID NO: 4809 - DNA, 10 bp, synthetic construct
  source 1..10: mol_type = other DNA
aatggaaaat

SEQ ID NO: 4810 - DNA, 12 bp, synthetic construct
  source 1..12: mol_type = other DNA
ggaagtgaaagt

SEQ ID NO: 4811 - DNA, 12 bp, synthetic construct
  source 1..12: mol_type = other DNA
actttcacttcc

SEQ ID NO: 4812 - DNA, 12 bp, synthetic construct
  source 1..12: mol_type = other DNA
ggaagtgaaact

SEQ ID NO: 4813 - DNA, 12 bp, synthetic construct
  source 1..12: mol_type = other DNA
agtttcacttcc

SEQ ID NO: 4814 - DNA, 10 bp, synthetic construct
  source 1..10: mol_type = other DNA
aacaggaagt

SEQ ID NO: 4815 - DNA, 10 bp, synthetic construct
  source 1..10: mol_type = other DNA
acttcctgtt

SEQ ID NO: 4816 - DNA, 12 bp, synthetic construct
  source 1..12: mol_type = other DNA
ggtcaaaggtca

SEQ ID NO: 4817 - DNA, 12 bp, synthetic construct
  source 1..12: mol_type = other DNA
tgacctttgacc

SEQ ID NO: 4818 - DNA, 10 bp, synthetic construct
  source 1..10: mol_type = other DNA
ccacgcccac

SEQ ID NO: 4819 - DNA, 10 bp, synthetic construct
  source 1..10: mol_type = other DNA
gtgggcgtgg

SEQ ID NO: 4820 - DNA, 10 bp, synthetic construct
  source 1..10: mol_type = other DNA
ccacgccccc

SEQ ID NO: 4821 - DNA, 10 bp, synthetic construct
  source 1..10: mol_type = other DNA
gggggcgtgg

SEQ ID NO: 4822-4833 - skipped (12 entries)

SEQ ID NO: 4834 - DNA, 21 bp, synthetic construct
  source 1..21: mol_type = other DNA
agaattagtgaactggaagat

SEQ ID NO: 4835 - DNA, 21 bp, synthetic construct
  source 1..21: mol_type = other DNA
atcttccagttcactaattct

SEQ ID NO: 4836 - DNA, 12 bp, synthetic construct
  source 1..12: mol_type = other DNA
aaactaggtcaa

SEQ ID NO: 4837 - DNA, 12 bp, synthetic construct
  source 1..12: mol_type = other DNA
ttgacctagttt

SEQ ID NO: 4838 - DNA, 12 bp, synthetic construct
  source 1..12: mol_type = other DNA
aaactaggtcac

SEQ ID NO: 4839 - DNA, 12 bp, synthetic construct
  source 1..12: mol_type = other DNA
gtgacctagttt

SEQ ID NO: 4840 - DNA, 12 bp, synthetic construct
  source 1..12: mol_type = other DNA
aaactaggtcag

SEQ ID NO: 4841 - DNA, 12 bp, synthetic construct
  source 1..12: mol_type = other DNA
ctgacctagttt

SEQ ID NO: 4842 - DNA, 12 bp, synthetic construct
  source 1..12: mol_type = other DNA
aaagtaggtcaa

SEQ ID NO: 4843 - DNA, 12 bp, synthetic construct
  source 1..12: mol_type = other DNA
ttgacctacttt

SEQ ID NO: 4844 - DNA, 12 bp, synthetic construct
  source 1..12: mol_type = other DNA
aaagtaggtcac

SEQ ID NO: 4845 - DNA, 12 bp, synthetic construct
  source 1..12: mol_type = other DNA
gtgacctacttt

SEQ ID NO: 4846 - DNA, 12 bp, synthetic construct
  source 1..12: mol_type = other DNA
aaagtaggtcag

SEQ ID NO: 4847 - DNA, 12 bp, synthetic construct
  source 1..12: mol_type = other DNA
ctgacctacttt

SEQ ID NO: 4848 - DNA, 12 bp, synthetic construct
  source 1..12: mol_type = other DNA
aaattaggtcaa

SEQ ID NO: 4849 - DNA, 12 bp, synthetic construct
  source 1..12: mol_type = other DNA
ttgacctaattt

SEQ ID NO: 4850 - DNA, 12 bp, synthetic construct
  source 1..12: mol_type = other DNA
aaattaggtcac

SEQ ID NO: 4851 - DNA, 12 bp, synthetic construct
  source 1..12: mol_type = other DNA
gtgacctaattt

SEQ ID NO: 4852 - DNA, 12 bp, synthetic construct
  source 1..12: mol_type = other DNA
aaattaggtcag

SEQ ID NO: 4853 - DNA, 12 bp, synthetic construct
  source 1..12: mol_type = other DNA
ctgacctaattt

SEQ ID NO: 4854 - DNA, 12 bp, synthetic construct
  source 1..12: mol_type = other DNA
taactaggtcaa

SEQ ID NO: 4855 - DNA, 12 bp, synthetic construct
  source 1..12: mol_type = other DNA
ttgacctagtta

SEQ ID NO: 4856 - DNA, 12 bp, synthetic construct
  source 1..12: mol_type = other DNA
taactaggtcac

SEQ ID NO: 4857 - DNA, 12 bp, synthetic construct
  source 1..12: mol_type = other DNA
gtgacctagtta

SEQ ID NO: 4858 - DNA, 12 bp, synthetic construct
  source 1..12: mol_type = other DNA
taactaggtcag

SEQ ID NO: 4859 - DNA, 12 bp, synthetic construct
  source 1..12: mol_type = other DNA
ctgacctagtta

SEQ ID NO: 4860 - DNA, 12 bp, synthetic construct
  source 1..12: mol_type = other DNA
taagtaggtcaa

SEQ ID NO: 4861 - DNA, 12 bp, synthetic construct
  source 1..12: mol_type = other DNA
ttgacctactta

SEQ ID NO: 4862 - DNA, 12 bp, synthetic construct
  source 1..12: mol_type = other DNA
taagtaggtcac

SEQ ID NO: 4863 - DNA, 12 bp, synthetic construct
  source 1..12: mol_type = other DNA
gtgacctactta

SEQ ID NO: 4864 - DNA, 12 bp, synthetic construct
  source 1..12: mol_type = other DNA
taagtaggtcag

SEQ ID NO: 4865 - DNA, 12 bp, synthetic construct
  source 1..12: mol_type = other DNA
ctgacctactta

SEQ ID NO: 4866 - DNA, 12 bp, synthetic construct
  source 1..12: mol_type = other DNA
taattaggtcaa

SEQ ID NO: 4867 - DNA, 12 bp, synthetic construct
  source 1..12: mol_type = other DNA
ttgacctaatta

SEQ ID NO: 4868 - DNA, 12 bp, synthetic construct
  source 1..12: mol_type = other DNA
taattaggtcac

SEQ ID NO: 4869 - DNA, 12 bp, synthetic construct
  source 1..12: mol_type = other DNA
gtgacctaatta

SEQ ID NO: 4870 - DNA, 12 bp, synthetic construct
  source 1..12: mol_type = other DNA
taattaggtcag

SEQ ID NO: 4871 - DNA, 12 bp, synthetic construct
  source 1..12: mol_type = other DNA
ctgacctaatta

SEQ ID NO: 4872 - DNA, 12 bp, synthetic construct
  source 1..12: mol_type = other DNA
agtttcagtttc

SEQ ID NO: 4873 - DNA, 12 bp, synthetic construct
  source 1..12: mol_type = other DNA
gaaactgaaact

SEQ ID NO: 4874-4889 - skipped (16 entries)

SEQ ID NO: 4890 - DNA, 14 bp, synthetic construct
  source 1..14: mol_type = other DNA
ctggcaggctgcca

SEQ ID NO: 4891 - DNA, 14 bp, synthetic construct
  source 1..14: mol_type = other DNA
tggcagcctgccag

SEQ ID NO: 4892-4907 - skipped (16 entries)

SEQ ID NO: 4908 - DNA, 13 bp, synthetic construct
  source 1..13: mol_type = other DNA
cgaaaacgaaatt

SEQ ID NO: 4909 - DNA, 13 bp, synthetic construct
  source 1..13: mol_type = other DNA
aatttcgttttcg

SEQ ID NO: 4910 - DNA, 13 bp, synthetic construct
  source 1..13: mol_type = other DNA
cgaaaatgaaatt

SEQ ID NO: 4911 - DNA, 13 bp, synthetic construct
  source 1..13: mol_type = other DNA
aatttcattttcg

SEQ ID NO: 4912 - DNA, 13 bp, synthetic construct
  source 1..13: mol_type = other DNA
cgaaagcgaaatt

SEQ ID NO: 4913 - DNA, 13 bp, synthetic construct
  source 1..13: mol_type = other DNA
aatttcgctttcg

SEQ ID NO: 4914 - DNA, 13 bp, synthetic construct
  source 1..13: mol_type = other DNA
cgaaagtgaaatt

SEQ ID NO: 4915 - DNA, 13 bp, synthetic construct
  source 1..13: mol_type = other DNA
aatttcactttcg

SEQ ID NO: 4916 - DNA, 10 bp, synthetic construct
  source 1..10: mol_type = other DNA
acttccgggt

SEQ ID NO: 4917 - DNA, 10 bp, synthetic construct
  source 1..10: mol_type = other DNA
acccggaagt

SEQ ID NO: 4918 - DNA, 10 bp, synthetic construct
  source 1..10: mol_type = other DNA
acttccggtt

SEQ ID NO: 4919 - DNA, 10 bp, synthetic construct
  source 1..10: mol_type = other DNA
aaccggaagt

SEQ ID NO: 4920 - DNA, 10 bp, synthetic construct
  source 1..10: mol_type = other DNA
acttcctggt

SEQ ID NO: 4921 - DNA, 10 bp, synthetic construct
  source 1..10: mol_type = other DNA
accaggaagt

SEQ ID NO: 4922 - DNA, 10 bp, synthetic construct
  source 1..10: mol_type = other DNA
acttcctgtt

SEQ ID NO: 4923 - DNA, 10 bp, synthetic construct
  source 1..10: mol_type = other DNA
aacaggaagt

SEQ ID NO: 4924 - DNA, 10 bp, synthetic construct
  source 1..10: mol_type = other DNA
aacttccggc

SEQ ID NO: 4925 - DNA, 10 bp, synthetic construct
  source 1..10: mol_type = other DNA
gccggaagtt

SEQ ID NO: 4926 - DNA, 10 bp, synthetic construct
  source 1..10: mol_type = other DNA
aacttccggt

SEQ ID NO: 4927 - DNA, 10 bp, synthetic construct
  source 1..10: mol_type = other DNA
accggaagtt

SEQ ID NO: 4928 - DNA, 10 bp, synthetic construct
  source 1..10: mol_type = other DNA
cacttccggc

SEQ ID NO: 4929 - DNA, 10 bp, synthetic construct
  source 1..10: mol_type = other DNA
gccggaagtg

SEQ ID NO: 4930 - DNA, 10 bp, synthetic construct
  source 1..10: mol_type = other DNA
cacttccggt

SEQ ID NO: 4931 - DNA, 10 bp, synthetic construct
  source 1..10: mol_type = other DNA
accggaagtg

SEQ ID NO: 4932 - DNA, 10 bp, synthetic construct
  source 1..10: mol_type = other DNA
tacttccggc

SEQ ID NO: 4933 - DNA, 10 bp, synthetic construct
  source 1..10: mol_type = other DNA
gccggaagta

SEQ ID NO: 4934 - DNA, 10 bp, synthetic construct
  source 1..10: mol_type = other DNA
tacttccggt

SEQ ID NO: 4935 - DNA, 10 bp, synthetic construct
  source 1..10: mol_type = other DNA
accggaagta

SEQ ID NO: 4936 - DNA, 10 bp, synthetic construct
  source 1..10: mol_type = other DNA
ggaaattccc

SEQ ID NO: 4937 - DNA, 10 bp, synthetic construct
  source 1..10: mol_type = other DNA
gggaatttcc

SEQ ID NO: 4938 - DNA, 15 bp, synthetic construct
  source 1..15: mol_type = other DNA
aacgaaaccgaaact

SEQ ID NO: 4939 - DNA, 15 bp, synthetic construct
  source 1..15: mol_type = other DNA
agtttcggtttcgtt

SEQ ID NO: 4940 - DNA, 12 bp, synthetic construct
  source 1..12: mol_type = other DNA
gaaagcgaaagc

SEQ ID NO: 4941 - DNA, 12 bp, synthetic construct
  source 1..12: mol_type = other DNA
gctttcgctttc

SEQ ID NO: 4942 - DNA, 12 bp, synthetic construct
  source 1..12: mol_type = other DNA
gaaagcgaaagt

SEQ ID NO: 4943 - DNA, 12 bp, synthetic construct
  source 1..12: mol_type = other DNA
actttcgctttc

SEQ ID NO: 4944 - DNA, 12 bp, synthetic construct
  source 1..12: mol_type = other DNA
gaaagcgaaacc

SEQ ID NO: 4945 - DNA, 12 bp, synthetic construct
  source 1..12: mol_type = other DNA
ggtttcgctttc

SEQ ID NO: 4946 - DNA, 12 bp, synthetic construct
  source 1..12: mol_type = other DNA
gaaagcgaaact

SEQ ID NO: 4947 - DNA, 12 bp, synthetic construct
  source 1..12: mol_type = other DNA
agtttcgctttc

SEQ ID NO: 4948 - DNA, 12 bp, synthetic construct
  source 1..12: mol_type = other DNA
gaaagtgaaagc

SEQ ID NO: 4949 - DNA, 12 bp, synthetic construct
  source 1..12: mol_type = other DNA
gctttcactttc

SEQ ID NO: 4950 - DNA, 12 bp, synthetic construct
  source 1..12: mol_type = other DNA
gaaagtgaaagt

SEQ ID NO: 4951 - DNA, 12 bp, synthetic construct
  source 1..12: mol_type = other DNA
actttcactttc

SEQ ID NO: 4952 - DNA, 12 bp, synthetic construct
  source 1..12: mol_type = other DNA
gaaagtgaaacc

SEQ ID NO: 4953 - DNA, 12 bp, synthetic construct
  source 1..12: mol_type = other DNA
ggtttcactttc

SEQ ID NO: 4954 - DNA, 12 bp, synthetic construct
  source 1..12: mol_type = other DNA
gaaagtgaaact

SEQ ID NO: 4955 - DNA, 12 bp, synthetic construct
  source 1..12: mol_type = other DNA
agtttcactttc

SEQ ID NO: 4956 - DNA, 12 bp, synthetic construct
  source 1..12: mol_type = other DNA
gaaaccgaaagc

SEQ ID NO: 4957 - DNA, 12 bp, synthetic construct
  source 1..12: mol_type = other DNA
gctttcggtttc

SEQ ID NO: 4958 - DNA, 12 bp, synthetic construct
  source 1..12: mol_type = other DNA
gaaaccgaaagt

SEQ ID NO: 4959 - DNA, 12 bp, synthetic construct
  source 1..12: mol_type = other DNA
actttcggtttc

SEQ ID NO: 4960 - DNA, 12 bp, synthetic construct
  source 1..12: mol_type = other DNA
gaaaccgaaacc

SEQ ID NO: 4961 - DNA, 12 bp, synthetic construct
  source 1..12: mol_type = other DNA
ggtttcggtttc

SEQ ID NO: 4962 - DNA, 12 bp, synthetic construct
  source 1..12: mol_type = other DNA
gaaaccgaaact

SEQ ID NO: 4963 - DNA, 12 bp, synthetic construct
  source 1..12: mol_type = other DNA
agtttcggtttc

SEQ ID NO: 4964 - DNA, 12 bp, synthetic construct
  source 1..12: mol_type = other DNA
gaaactgaaagc

SEQ ID NO: 4965 - DNA, 12 bp, synthetic construct
  source 1..12: mol_type = other DNA
gctttcagtttc

SEQ ID NO: 4966 - DNA, 12 bp, synthetic construct
  source 1..12: mol_type = other DNA
gaaactgaaagt

SEQ ID NO: 4967 - DNA, 12 bp, synthetic construct
  source 1..12: mol_type = other DNA
actttcagtttc

SEQ ID NO: 4968 - DNA, 12 bp, synthetic construct
  source 1..12: mol_type = other DNA
gaaactgaaacc

SEQ ID NO: 4969 - DNA, 12 bp, synthetic construct
  source 1..12: mol_type = other DNA
ggtttcagtttc

SEQ ID NO: 4970 - DNA, 12 bp, synthetic construct
  source 1..12: mol_type = other DNA
gaaactgaaact

SEQ ID NO: 4971 - DNA, 12 bp, synthetic construct
  source 1..12: mol_type = other DNA
agtttcagtttc

SEQ ID NO: 4972 - DNA, 10 bp, synthetic construct
  source 1..10: mol_type = other DNA
gtgaccttga

SEQ ID NO: 4973 - DNA, 10 bp, synthetic construct
  source 1..10: mol_type = other DNA
tcaaggtcac

SEQ ID NO: 4974 - DNA, 10 bp, synthetic construct
  source 1..10: mol_type = other DNA
aacaggaaat

SEQ ID NO: 4975 - DNA, 10 bp, synthetic construct
  source 1..10: mol_type = other DNA
atttcctgtt

SEQ ID NO: 4976 - DNA, 10 bp, synthetic construct
  source 1..10: mol_type = other DNA
aaaccacaaa

SEQ ID NO: 4977 - DNA, 10 bp, synthetic construct
  source 1..10: mol_type = other DNA
tttgtggttt

SEQ ID NO: 4978-4979 - skipped (2 entries)

SEQ ID NO: 4980 - DNA, 10 bp, synthetic construct
  source 1..10: mol_type = other DNA
accggaagtg

SEQ ID NO: 4981 - DNA, 10 bp, synthetic construct
  source 1..10: mol_type = other DNA
cacttccggt

SEQ ID NO: 4982 - DNA, 12 bp, synthetic construct
  source 1..12: mol_type = other DNA
aggggatttccc

SEQ ID NO: 4983 - DNA, 12 bp, synthetic construct
  source 1..12: mol_type = other DNA
gggaaatcccct

SEQ ID NO: 4984 - DNA, 12 bp, synthetic construct
  source 1..12: mol_type = other DNA
gaaagtgaaagt

SEQ ID NO: 4985 - DNA, 12 bp, synthetic construct
  source 1..12: mol_type = other DNA
actttcactttc

SEQ ID NO: 4986 - DNA, 11 bp, synthetic construct
  source 1..11: mol_type = other DNA
gacacgccccc

SEQ ID NO: 4987 - DNA, 11 bp, synthetic construct
  source 1..11: mol_type = other DNA
gggggcgtgtc

SEQ ID NO: 4988 - DNA, 11 bp, synthetic construct
  source 1..11: mol_type = other DNA
gccacgccccc

SEQ ID NO: 4989 - DNA, 11 bp, synthetic construct
  source 1..11: mol_type = other DNA
gggggcgtggc

SEQ ID NO: 4990 - DNA, 11 bp, synthetic construct
  source 1..11: mol_type = other DNA
acgcccacgca

SEQ ID NO: 4991 - DNA, 11 bp, synthetic construct
  source 1..11: mol_type = other DNA
tgcgtgggcgt

SEQ ID NO: 4992 - DNA, 11 bp, synthetic construct
  source 1..11: mol_type = other DNA
ccgcccacgca

SEQ ID NO: 4993 - DNA, 11 bp, synthetic construct
  source 1..11: mol_type = other DNA
tgcgtgggcgg

SEQ ID NO: 4994 - DNA, 11 bp, synthetic construct
  source 1..11: mol_type = other DNA
gggaatttcca

SEQ ID NO: 4995 - DNA, 11 bp, synthetic construct
  source 1..11: mol_type = other DNA
tggaaattccc

SEQ ID NO: 4996 - DNA, 11 bp, synthetic construct
  source 1..11: mol_type = other DNA
gggaatttccc

SEQ ID NO: 4997 - DNA, 11 bp, synthetic construct
  source 1..11: mol_type = other DNA
gggaaattccc

SEQ ID NO: 4998 - DNA, 11 bp, synthetic construct
  source 1..11: mol_type = other DNA
gggactttcca

SEQ ID NO: 4999 - DNA, 11 bp, synthetic construct
  source 1..11: mol_type = other DNA
tggaaagtccc

SEQ ID NO: 5000 - DNA, 11 bp, synthetic construct
  source 1..11: mol_type = other DNA
gggactttccc

SEQ ID NO: 5001 - DNA, 11 bp, synthetic construct
  source 1..11: mol_type = other DNA
gggaaagtccc

SEQ ID NO: 5002 - DNA, 11 bp, synthetic construct
  source 1..11: mol_type = other DNA
ggggatttcca

SEQ ID NO: 5003 - DNA, 11 bp, synthetic construct
  source 1..11: mol_type = other DNA
tggaaatcccc

SEQ ID NO: 5004 - DNA, 11 bp, synthetic construct
  source 1..11: mol_type = other DNA
ggggatttccc

SEQ ID NO: 5005 - DNA, 11 bp, synthetic construct
  source 1..11: mol_type = other DNA
gggaaatcccc

SEQ ID NO: 5006 - DNA, 11 bp, synthetic construct
  source 1..11: mol_type = other DNA
ggggctttcca

SEQ ID NO: 5007 - DNA, 11 bp, synthetic construct
  source 1..11: mol_type = other DNA
tggaaagcccc

SEQ ID NO: 5008 - DNA, 11 bp, synthetic construct
  source 1..11: mol_type = other DNA
ggggctttccc

SEQ ID NO: 5009 - DNA, 11 bp, synthetic construct
  source 1..11: mol_type = other DNA
gggaaagcccc

SEQ ID NO: 5010 - DNA, 10 bp, synthetic construct
  source 1..10: mol_type = other DNA
caaaccacag

SEQ ID NO: 5011 - DNA, 10 bp, synthetic construct
  source 1..10: mol_type = other DNA
ctgtggtttg

SEQ ID NO: 5012-5027 - skipped (16 entries)

SEQ ID NO: 5028 - DNA, 10 bp, synthetic construct
  source 1..10: mol_type = other DNA
aaccggaagt

SEQ ID NO: 5029 - DNA, 10 bp, synthetic construct
  source 1..10: mol_type = other DNA
acttccggtt

SEQ ID NO: 5030-5041 - skipped (12 entries)

SEQ ID NO: 5042 - DNA, 10 bp, synthetic construct
  source 1..10: mol_type = other DNA
acaggaagtg

SEQ ID NO: 5043 - DNA, 10 bp, synthetic construct
  source 1..10: mol_type = other DNA
cacttcctgt

SEQ ID NO: 5044-5067 - skipped (24 entries)

SEQ ID NO: 5068 - DNA, 10 bp, synthetic construct
  source 1..10: mol_type = other DNA
agaggaagtg

SEQ ID NO: 5069 - DNA, 10 bp, synthetic construct
  source 1..10: mol_type = other DNA
cacttcctct

SEQ ID NO: 5070 - DNA, 10 bp, synthetic construct
  source 1..10: mol_type = other DNA
ccgcccacgc

SEQ ID NO: 5071 - DNA, 10 bp, synthetic construct
  source 1..10: mol_type = other DNA
gcgtgggcgg

SEQ ID NO: 5072 - DNA, 10 bp, synthetic construct
  source 1..10: mol_type = other DNA
ccgcccccgc

SEQ ID NO: 5073 - DNA, 10 bp, synthetic construct
  source 1..10: mol_type = other DNA
gcgggggcgg

SEQ ID NO: 5074 - DNA, 10 bp, synthetic construct
  source 1..10: mol_type = other DNA
gctgtggttt

SEQ ID NO: 5075 - DNA, 10 bp, synthetic construct
  source 1..10: mol_type = other DNA
aaaccacagc

SEQ ID NO: 5076 - DNA, 10 bp, synthetic construct
  source 1..10: mol_type = other DNA
aaccggaagt

SEQ ID NO: 5077 - DNA, 10 bp, synthetic construct
  source 1..10: mol_type = other DNA
acttccggtt

SEQ ID NO: 5078 - DNA, 10 bp, synthetic construct
  source 1..10: mol_type = other DNA
acaggaagtg

SEQ ID NO: 5079 - DNA, 10 bp, synthetic construct
  source 1..10: mol_type = other DNA
cacttcctgt

SEQ ID NO: 5080 - DNA, 12 bp, synthetic construct
  source 1..12: mol_type = other DNA
actcccacacac

SEQ ID NO: 5081 - DNA, 12 bp, synthetic construct
  source 1..12: mol_type = other DNA
gtgtgtgggagt

SEQ ID NO: 5082 - DNA, 12 bp, synthetic construct
  source 1..12: mol_type = other DNA
actcccacacag

SEQ ID NO: 5083 - DNA, 12 bp, synthetic construct
  source 1..12: mol_type = other DNA
ctgtgtgggagt

SEQ ID NO: 5084 - DNA, 12 bp, synthetic construct
  source 1..12: mol_type = other DNA
actcccacacat

SEQ ID NO: 5085 - DNA, 12 bp, synthetic construct
  source 1..12: mol_type = other DNA
atgtgtgggagt

SEQ ID NO: 5086 - DNA, 12 bp, synthetic construct
  source 1..12: mol_type = other DNA
actcccacgcac

SEQ ID NO: 5087 - DNA, 12 bp, synthetic construct
  source 1..12: mol_type = other DNA
gtgcgtgggagt

SEQ ID NO: 5088 - DNA, 12 bp, synthetic construct
  source 1..12: mol_type = other DNA
actcccacgcag

SEQ ID NO: 5089 - DNA, 12 bp, synthetic construct
  source 1..12: mol_type = other DNA
ctgcgtgggagt

SEQ ID NO: 5090 - DNA, 12 bp, synthetic construct
  source 1..12: mol_type = other DNA
actcccacgcat

SEQ ID NO: 5091 - DNA, 12 bp, synthetic construct
  source 1..12: mol_type = other DNA
atgcgtgggagt

SEQ ID NO: 5092 - DNA, 12 bp, synthetic construct
  source 1..12: mol_type = other DNA
actcccccacac

SEQ ID NO: 5093 - DNA, 12 bp, synthetic construct
  source 1..12: mol_type = other DNA
gtgtgggggagt

SEQ ID NO: 5094 - DNA, 12 bp, synthetic construct
  source 1..12: mol_type = other DNA
actcccccacag

SEQ ID NO: 5095 - DNA, 12 bp, synthetic construct
  source 1..12: mol_type = other DNA
ctgtgggggagt

SEQ ID NO: 5096 - DNA, 12 bp, synthetic construct
  source 1..12: mol_type = other DNA
actcccccacat

SEQ ID NO: 5097 - DNA, 12 bp, synthetic construct
  source 1..12: mol_type = other DNA
atgtgggggagt

SEQ ID NO: 5098 - DNA, 12 bp, synthetic construct
  source 1..12: mol_type = other DNA
actcccccgcac

SEQ ID NO: 5099 - DNA, 12 bp, synthetic construct
  source 1..12: mol_type = other DNA
gtgcgggggagt

SEQ ID NO: 5100 - DNA, 12 bp, synthetic construct
  source 1..12: mol_type = other DNA
actcccccgcag

SEQ ID NO: 5101 - DNA, 12 bp, synthetic construct
  source 1..12: mol_type = other DNA
ctgcgggggagt

SEQ ID NO: 5102 - DNA, 12 bp, synthetic construct
  source 1..12: mol_type = other DNA
actcccccgcat

SEQ ID NO: 5103 - DNA, 12 bp, synthetic construct
  source 1..12: mol_type = other DNA
atgcgggggagt

SEQ ID NO: 5104 - DNA, 12 bp, synthetic construct
  source 1..12: mol_type = other DNA
cctcccacacac

SEQ ID NO: 5105 - DNA, 12 bp, synthetic construct
  source 1..12: mol_type = other DNA
gtgtgtgggagg

SEQ ID NO: 5106 - DNA, 12 bp, synthetic construct
  source 1..12: mol_type = other DNA
cctcccacacag

SEQ ID NO: 5107 - DNA, 12 bp, synthetic construct
  source 1..12: mol_type = other DNA
ctgtgtgggagg

SEQ ID NO: 5108 - DNA, 12 bp, synthetic construct
  source 1..12: mol_type = other DNA
cctcccacacat

SEQ ID NO: 5109 - DNA, 12 bp, synthetic construct
  source 1..12: mol_type = other DNA
atgtgtgggagg

SEQ ID NO: 5110 - DNA, 12 bp, synthetic construct
  source 1..12: mol_type = other DNA
cctcccacgcac

SEQ ID NO: 5111 - DNA, 12 bp, synthetic construct
  source 1..12: mol_type = other DNA
gtgcgtgggagg

SEQ ID NO: 5112 - DNA, 12 bp, synthetic construct
  source 1..12: mol_type = other DNA
cctcccacgcag

SEQ ID NO: 5113 - DNA, 12 bp, synthetic construct
  source 1..12: mol_type = other DNA
ctgcgtgggagg

SEQ ID NO: 5114 - DNA, 12 bp, synthetic construct
  source 1..12: mol_type = other DNA
cctcccacgcat

SEQ ID NO: 5115 - DNA, 12 bp, synthetic construct
  source 1..12: mol_type = other DNA
atgcgtgggagg

SEQ ID NO: 5116 - DNA, 12 bp, synthetic construct
  source 1..12: mol_type = other DNA
cctcccccacac

SEQ ID NO: 5117 - DNA, 12 bp, synthetic construct
  source 1..12: mol_type = other DNA
gtgtgggggagg

SEQ ID NO: 5118 - DNA, 12 bp, synthetic construct
  source 1..12: mol_type = other DNA
cctcccccacag

SEQ ID NO: 5119 - DNA, 12 bp, synthetic construct
  source 1..12: mol_type = other DNA
ctgtgggggagg

SEQ ID NO: 5120 - DNA, 12 bp, synthetic construct
  source 1..12: mol_type = other DNA
cctcccccacat

SEQ ID NO: 5121 - DNA, 12 bp, synthetic construct
  source 1..12: mol_type = other DNA
atgtgggggagg

SEQ ID NO: 5122 - DNA, 12 bp, synthetic construct
  source 1..12: mol_type = other DNA
cctcccccgcac

SEQ ID NO: 5123 - DNA, 12 bp, synthetic construct
  source 1..12: mol_type = other DNA
gtgcgggggagg

SEQ ID NO: 5124 - DNA, 12 bp, synthetic construct
  source 1..12: mol_type = other DNA
cctcccccgcag

SEQ ID NO: 5125 - DNA, 12 bp, synthetic construct
  source 1..12: mol_type = other DNA
ctgcgggggagg

SEQ ID NO: 5126 - DNA, 12 bp, synthetic construct
  source 1..12: mol_type = other DNA
cctcccccgcat

SEQ ID NO: 5127 - DNA, 12 bp, synthetic construct
  source 1..12: mol_type = other DNA
atgcgggggagg

SEQ ID NO: 5128-5131 - skipped (4 entries)

SEQ ID NO: 5132 - DNA, 11 bp, synthetic construct
  source 1..11: mol_type = other DNA
gcgtgggcgga

SEQ ID NO: 5133 - DNA, 11 bp, synthetic construct
  source 1..11: mol_type = other DNA
tccgcccacgc

SEQ ID NO: 5134 - DNA, 11 bp, synthetic construct
  source 1..11: mol_type = other DNA
gcgtgggcggg

SEQ ID NO: 5135 - DNA, 11 bp, synthetic construct
  source 1..11: mol_type = other DNA
cccgcccacgc

SEQ ID NO: 5136-5139 - skipped (4 entries)

SEQ ID NO: 5140 - DNA, 10 bp, synthetic construct
  source 1..10: mol_type = other DNA
tgcgtgggcg

SEQ ID NO: 5141 - DNA, 10 bp, synthetic construct
  source 1..10: mol_type = other DNA
cgcccacgca

SEQ ID NO: 5142 - DNA, 10 bp, synthetic construct
  source 1..10: mol_type = other DNA
tgcgtgggtg

SEQ ID NO: 5143 - DNA, 10 bp, synthetic construct
  source 1..10: mol_type = other DNA
cacccacgca

SEQ ID NO: 5144 - DNA, 12 bp, synthetic construct
  source 1..12: mol_type = other DNA
tgacctttgcat

SEQ ID NO: 5145 - DNA, 12 bp, synthetic construct
  source 1..12: mol_type = other DNA
atgcaaaggtca

SEQ ID NO: 5146 - DNA, 140 bp, synthetic construct
  source 1..140: mol_type = other DNA
aatgagtcattgccgctaatgagtcattgctttaatgagtcattgatctaatgagtcattacgctaatgagtcattgccgctaatgagtcattgctttaatgagtcattgatctaatgagtcattacgctaatgagtcat

SEQ ID NO: 5147 - DNA, 140 bp, synthetic construct
  source 1..140: mol_type = other DNA
atgactcatttgccgctatgactcatttgctttatgactcatttgatctatgactcatttacgctatgactcatttgccgctatgactcatttgctttatgactcatttgatctatgactcatttacgctatgactcatt

SEQ ID NO: 5148 - DNA, 140 bp, synthetic construct
  source 1..140: mol_type = other DNA
aatgactcattgccgctaatgactcattgctttaatgactcattgatctaatgactcattacgctaatgactcattgccgctaatgactcattgctttaatgactcattgatctaatgactcattacgctaatgactcat

SEQ ID NO: 5149 - DNA, 140 bp, synthetic construct
  source 1..140: mol_type = other DNA
atgagtcatttgccgctatgagtcatttgctttatgagtcatttgatctatgagtcatttacgctatgagtcatttgccgctatgagtcatttgctttatgagtcatttgatctatgagtcatttacgctatgagtcatt

SEQ ID NO: 5150 - DNA, 140 bp, synthetic construct
  source 1..140: mol_type = other DNA
gatgagtcattgccgctgatgagtcattgctttgatgagtcattgatctgatgagtcattacgctgatgagtcattgccgctgatgagtcattgctttgatgagtcattgatctgatgagtcattacgctgatgagtcat

SEQ ID NO: 5151 - DNA, 140 bp, synthetic construct
  source 1..140: mol_type = other DNA
atgactcatctgccgctatgactcatctgctttatgactcatctgatctatgactcatctacgctatgactcatctgccgctatgactcatctgctttatgactcatctgatctatgactcatctacgctatgactcatc

SEQ ID NO: 5152 - DNA, 140 bp, synthetic construct
  source 1..140: mol_type = other DNA
gatgactcattgccgctgatgactcattgctttgatgactcattgatctgatgactcattacgctgatgactcattgccgctgatgactcattgctttgatgactcattgatctgatgactcattacgctgatgactcat

SEQ ID NO: 5153 - DNA, 140 bp, synthetic construct
  source 1..140: mol_type = other DNA
atgagtcatctgccgctatgagtcatctgctttatgagtcatctgatctatgagtcatctacgctatgagtcatctgccgctatgagtcatctgctttatgagtcatctgatctatgagtcatctacgctatgagtcatc

SEQ ID NO: 5154 - DNA, 133 bp, synthetic construct
  source 1..133: mol_type = other DNA
tgagtcataggtaaatttacgcttgagtcataggtaaatttgccgcttgagtcataggtaaatttgcttttgagtcataggtaaatttgatcttgagtcataggtaaatttacgcttgagtcataggtaaatt

SEQ ID NO: 5155 - DNA, 133 bp, synthetic construct
  source 1..133: mol_type = other DNA
aatttacctatgactcatacgctaatttacctatgactcatgccgctaatttacctatgactcatgctttaatttacctatgactcatgatctaatttacctatgactcatacgctaatttacctatgactca

SEQ ID NO: 5156 - DNA, 133 bp, synthetic construct
  source 1..133: mol_type = other DNA
tgagtcataggtagatttacgcttgagtcataggtagatttgccgcttgagtcataggtagatttgcttttgagtcataggtagatttgatcttgagtcataggtagatttacgcttgagtcataggtagatt

SEQ ID NO: 5157 - DNA, 133 bp, synthetic construct
  source 1..133: mol_type = other DNA
aatctacctatgactcatacgctaatctacctatgactcatgccgctaatctacctatgactcatgctttaatctacctatgactcatgatctaatctacctatgactcatacgctaatctacctatgactca

SEQ ID NO: 5158 - DNA, 133 bp, synthetic construct
  source 1..133: mol_type = other DNA
tgagtcataggtgaatttacgcttgagtcataggtgaatttgccgcttgagtcataggtgaatttgcttttgagtcataggtgaatttgatcttgagtcataggtgaatttacgcttgagtcataggtgaatt

SEQ ID NO: 5159 - DNA, 133 bp, synthetic construct
  source 1..133: mol_type = other DNA
aattcacctatgactcatacgctaattcacctatgactcatgccgctaattcacctatgactcatgctttaattcacctatgactcatgatctaattcacctatgactcatacgctaattcacctatgactca

SEQ ID NO: 5160 - DNA, 133 bp, synthetic construct
  source 1..133: mol_type = other DNA
tgagtcataggtggatttacgcttgagtcataggtggatttgccgcttgagtcataggtggatttgcttttgagtcataggtggatttgatcttgagtcataggtggatttacgcttgagtcataggtggatt

SEQ ID NO: 5161 - DNA, 133 bp, synthetic construct
  source 1..133: mol_type = other DNA
aatccacctatgactcatacgctaatccacctatgactcatgccgctaatccacctatgactcatgctttaatccacctatgactcatgatctaatccacctatgactcatacgctaatccacctatgactca

SEQ ID NO: 5162 - DNA, 133 bp, synthetic construct
  source 1..133: mol_type = other DNA
tgagtcattggtaaatttacgcttgagtcattggtaaatttgccgcttgagtcattggtaaatttgcttttgagtcattggtaaatttgatcttgagtcattggtaaatttacgcttgagtcattggtaaatt

SEQ ID NO: 5163 - DNA, 133 bp, synthetic construct
  source 1..133: mol_type = other DNA
aatttaccaatgactcatacgctaatttaccaatgactcatgccgctaatttaccaatgactcatgctttaatttaccaatgactcatgatctaatttaccaatgactcatacgctaatttaccaatgactca

SEQ ID NO: 5164 - DNA, 133 bp, synthetic construct
  source 1..133: mol_type = other DNA
tgagtcattggtagatttacgcttgagtcattggtagatttgccgcttgagtcattggtagatttgcttttgagtcattggtagatttgatcttgagtcattggtagatttacgcttgagtcattggtagatt

SEQ ID NO: 5165 - DNA, 133 bp, synthetic construct
  source 1..133: mol_type = other DNA
aatctaccaatgactcatacgctaatctaccaatgactcatgccgctaatctaccaatgactcatgctttaatctaccaatgactcatgatctaatctaccaatgactcatacgctaatctaccaatgactca

SEQ ID NO: 5166 - DNA, 133 bp, synthetic construct
  source 1..133: mol_type = other DNA
tgagtcattggtgaatttacgcttgagtcattggtgaatttgccgcttgagtcattggtgaatttgcttttgagtcattggtgaatttgatcttgagtcattggtgaatttacgcttgagtcattggtgaatt

SEQ ID NO: 5167 - DNA, 133 bp, synthetic construct
  source 1..133: mol_type = other DNA
aattcaccaatgactcatacgctaattcaccaatgactcatgccgctaattcaccaatgactcatgctttaattcaccaatgactcatgatctaattcaccaatgactcatacgctaattcaccaatgactca

SEQ ID NO: 5168 - DNA, 133 bp, synthetic construct
  source 1..133: mol_type = other DNA
tgagtcattggtggatttacgcttgagtcattggtggatttgccgcttgagtcattggtggatttgcttttgagtcattggtggatttgatcttgagtcattggtggatttacgcttgagtcattggtggatt

SEQ ID NO: 5169 - DNA, 133 bp, synthetic construct
  source 1..133: mol_type = other DNA
aatccaccaatgactcatacgctaatccaccaatgactcatgccgctaatccaccaatgactcatgctttaatccaccaatgactcatgatctaatccaccaatgactcatacgctaatccaccaatgactca

SEQ ID NO: 5170 - DNA, 133 bp, synthetic construct
  source 1..133: mol_type = other DNA
tgactcataggtaaatttacgcttgactcataggtaaatttgccgcttgactcataggtaaatttgcttttgactcataggtaaatttgatcttgactcataggtaaatttacgcttgactcataggtaaatt

SEQ ID NO: 5171 - DNA, 133 bp, synthetic construct
  source 1..133: mol_type = other DNA
aatttacctatgagtcatacgctaatttacctatgagtcatgccgctaatttacctatgagtcatgctttaatttacctatgagtcatgatctaatttacctatgagtcatacgctaatttacctatgagtca

SEQ ID NO: 5172 - DNA, 133 bp, synthetic construct
  source 1..133: mol_type = other DNA
tgactcataggtagatttacgcttgactcataggtagatttgccgcttgactcataggtagatttgcttttgactcataggtagatttgatcttgactcataggtagatttacgcttgactcataggtagatt

SEQ ID NO: 5173 - DNA, 133 bp, synthetic construct
  source 1..133: mol_type = other DNA
aatctacctatgagtcatacgctaatctacctatgagtcatgccgctaatctacctatgagtcatgctttaatctacctatgagtcatgatctaatctacctatgagtcatacgctaatctacctatgagtca

SEQ ID NO: 5174 - DNA, 133 bp, synthetic construct
  source 1..133: mol_type = other DNA
tgactcataggtgaatttacgcttgactcataggtgaatttgccgcttgactcataggtgaatttgcttttgactcataggtgaatttgatcttgactcataggtgaatttacgcttgactcataggtgaatt

SEQ ID NO: 5175 - DNA, 133 bp, synthetic construct
  source 1..133: mol_type = other DNA
aattcacctatgagtcatacgctaattcacctatgagtcatgccgctaattcacctatgagtcatgctttaattcacctatgagtcatgatctaattcacctatgagtcatacgctaattcacctatgagtca

SEQ ID NO: 5176 - DNA, 133 bp, synthetic construct
  source 1..133: mol_type = other DNA
tgactcataggtggatttacgcttgactcataggtggatttgccgcttgactcataggtggatttgcttttgactcataggtggatttgatcttgactcataggtggatttacgcttgactcataggtggatt

SEQ ID NO: 5177 - DNA, 133 bp, synthetic construct
  source 1..133: mol_type = other DNA
aatccacctatgagtcatacgctaatccacctatgagtcatgccgctaatccacctatgagtcatgctttaatccacctatgagtcatgatctaatccacctatgagtcatacgctaatccacctatgagtca

SEQ ID NO: 5178 - DNA, 133 bp, synthetic construct
  source 1..133: mol_type = other DNA
tgactcattggtaaatttacgcttgactcattggtaaatttgccgcttgactcattggtaaatttgcttttgactcattggtaaatttgatcttgactcattggtaaatttacgcttgactcattggtaaatt

SEQ ID NO: 5179 - DNA, 133 bp, synthetic construct
  source 1..133: mol_type = other DNA
aatttaccaatgagtcatacgctaatttaccaatgagtcatgccgctaatttaccaatgagtcatgctttaatttaccaatgagtcatgatctaatttaccaatgagtcatacgctaatttaccaatgagtca

SEQ ID NO: 5180 - DNA, 133 bp, synthetic construct
  source 1..133: mol_type = other DNA
tgactcattggtagatttacgcttgactcattggtagatttgccgcttgactcattggtagatttgcttttgactcattggtagatttgatcttgactcattggtagatttacgcttgactcattggtagatt

SEQ ID NO: 5181 - DNA, 133 bp, synthetic construct
  source 1..133: mol_type = other DNA
aatctaccaatgagtcatacgctaatctaccaatgagtcatgccgctaatctaccaatgagtcatgctttaatctaccaatgagtcatgatctaatctaccaatgagtcatacgctaatctaccaatgagtca

SEQ ID NO: 5182 - DNA, 133 bp, synthetic construct
  source 1..133: mol_type = other DNA
tgactcattggtgaatttacgcttgactcattggtgaatttgccgcttgactcattggtgaatttgcttttgactcattggtgaatttgatcttgactcattggtgaatttacgcttgactcattggtgaatt

SEQ ID NO: 5183 - DNA, 133 bp, synthetic construct
  source 1..133: mol_type = other DNA
aattcaccaatgagtcatacgctaattcaccaatgagtcatgccgctaattcaccaatgagtcatgctttaattcaccaatgagtcatgatctaattcaccaatgagtcatacgctaattcaccaatgagtca

SEQ ID NO: 5184 - DNA, 133 bp, synthetic construct
  source 1..133: mol_type = other DNA
tgactcattggtggatttacgcttgactcattggtggatttgccgcttgactcattggtggatttgcttttgactcattggtggatttgatcttgactcattggtggatttacgcttgactcattggtggatt

SEQ ID NO: 5185 - DNA, 133 bp, synthetic construct
  source 1..133: mol_type = other DNA
aatccaccaatgagtcatacgctaatccaccaatgagtcatgccgctaatccaccaatgagtcatgctttaatccaccaatgagtcatgatctaatccaccaatgagtcatacgctaatccaccaatgagtca

SEQ ID NO: 5186 - DNA, 142 bp, synthetic construct
  source 1..142: mol_type = other DNA
tgagtcatatccaaatgatcttgagtcatatccaaatacgcttgagtcatatccaaatgccgcttgagtcatatccaaatgcttttgagtcatatccaaatgatcttgagtcatatccaaatacgcttgagtcatatccaaa

SEQ ID NO: 5187 - DNA, 142 bp, synthetic construct
  source 1..142: mol_type = other DNA
tttggatatgactcatgatcttttggatatgactcatacgcttttggatatgactcatgccgcttttggatatgactcatgcttttttggatatgactcatgatcttttggatatgactcatacgcttttggatatgactca

SEQ ID NO: 5188 - DNA, 142 bp, synthetic construct
  source 1..142: mol_type = other DNA
tgagtcatatccagatgatcttgagtcatatccagatacgcttgagtcatatccagatgccgcttgagtcatatccagatgcttttgagtcatatccagatgatcttgagtcatatccagatacgcttgagtcatatccaga

SEQ ID NO: 5189 - DNA, 142 bp, synthetic construct
  source 1..142: mol_type = other DNA
tctggatatgactcatgatcttctggatatgactcatacgcttctggatatgactcatgccgcttctggatatgactcatgcttttctggatatgactcatgatcttctggatatgactcatacgcttctggatatgactca

SEQ ID NO: 5190 - DNA, 142 bp, synthetic construct
  source 1..142: mol_type = other DNA
tgagtcatatccgaatgatcttgagtcatatccgaatacgcttgagtcatatccgaatgccgcttgagtcatatccgaatgcttttgagtcatatccgaatgatcttgagtcatatccgaatacgcttgagtcatatccgaa

SEQ ID NO: 5191 - DNA, 142 bp, synthetic construct
  source 1..142: mol_type = other DNA
ttcggatatgactcatgatctttcggatatgactcatacgctttcggatatgactcatgccgctttcggatatgactcatgctttttcggatatgactcatgatctttcggatatgactcatacgctttcggatatgactca

SEQ ID NO: 5192 - DNA, 142 bp, synthetic construct
  source 1..142: mol_type = other DNA
tgagtcatatccggatgatcttgagtcatatccggatacgcttgagtcatatccggatgccgcttgagtcatatccggatgcttttgagtcatatccggatgatcttgagtcatatccggatacgcttgagtcatatccgga

SEQ ID NO: 5193 - DNA, 142 bp, synthetic construct
  source 1..142: mol_type = other DNA
tccggatatgactcatgatcttccggatatgactcatacgcttccggatatgactcatgccgcttccggatatgactcatgcttttccggatatgactcatgatcttccggatatgactcatacgcttccggatatgactca

SEQ ID NO: 5194 - DNA, 142 bp, synthetic construct
  source 1..142: mol_type = other DNA
tgagtcatattcaaatgatcttgagtcatattcaaatacgcttgagtcatattcaaatgccgcttgagtcatattcaaatgcttttgagtcatattcaaatgatcttgagtcatattcaaatacgcttgagtcatattcaaa

SEQ ID NO: 5195 - DNA, 142 bp, synthetic construct
  source 1..142: mol_type = other DNA
tttgaatatgactcatgatcttttgaatatgactcatacgcttttgaatatgactcatgccgcttttgaatatgactcatgcttttttgaatatgactcatgatcttttgaatatgactcatacgcttttgaatatgactca

SEQ ID NO: 5196 - DNA, 142 bp, synthetic construct
  source 1..142: mol_type = other DNA
tgagtcatattcagatgatcttgagtcatattcagatacgcttgagtcatattcagatgccgcttgagtcatattcagatgcttttgagtcatattcagatgatcttgagtcatattcagatacgcttgagtcatattcaga

SEQ ID NO: 5197 - DNA, 142 bp, synthetic construct
  source 1..142: mol_type = other DNA
tctgaatatgactcatgatcttctgaatatgactcatacgcttctgaatatgactcatgccgcttctgaatatgactcatgcttttctgaatatgactcatgatcttctgaatatgactcatacgcttctgaatatgactca

SEQ ID NO: 5198 - DNA, 142 bp, synthetic construct
  source 1..142: mol_type = other DNA
tgagtcatattcgaatgatcttgagtcatattcgaatacgcttgagtcatattcgaatgccgcttgagtcatattcgaatgcttttgagtcatattcgaatgatcttgagtcatattcgaatacgcttgagtcatattcgaa

SEQ ID NO: 5199 - DNA, 142 bp, synthetic construct
  source 1..142: mol_type = other DNA
ttcgaatatgactcatgatctttcgaatatgactcatacgctttcgaatatgactcatgccgctttcgaatatgactcatgctttttcgaatatgactcatgatctttcgaatatgactcatacgctttcgaatatgactca

SEQ ID NO: 5200 - DNA, 142 bp, synthetic construct
  source 1..142: mol_type = other DNA
tgagtcatattcggatgatcttgagtcatattcggatacgcttgagtcatattcggatgccgcttgagtcatattcggatgcttttgagtcatattcggatgatcttgagtcatattcggatacgcttgagtcatattcgga

SEQ ID NO: 5201 - DNA, 142 bp, synthetic construct
  source 1..142: mol_type = other DNA
tccgaatatgactcatgatcttccgaatatgactcatacgcttccgaatatgactcatgccgcttccgaatatgactcatgcttttccgaatatgactcatgatcttccgaatatgactcatacgcttccgaatatgactca

SEQ ID NO: 5202 - DNA, 142 bp, synthetic construct
  source 1..142: mol_type = other DNA
tgagtcatttccaaatgatcttgagtcatttccaaatacgcttgagtcatttccaaatgccgcttgagtcatttccaaatgcttttgagtcatttccaaatgatcttgagtcatttccaaatacgcttgagtcatttccaaa

SEQ ID NO: 5203 - DNA, 142 bp, synthetic construct
  source 1..142: mol_type = other DNA
tttggaaatgactcatgatcttttggaaatgactcatacgcttttggaaatgactcatgccgcttttggaaatgactcatgcttttttggaaatgactcatgatcttttggaaatgactcatacgcttttggaaatgactca

SEQ ID NO: 5204 - DNA, 142 bp, synthetic construct
  source 1..142: mol_type = other DNA
tgagtcatttccagatgatcttgagtcatttccagatacgcttgagtcatttccagatgccgcttgagtcatttccagatgcttttgagtcatttccagatgatcttgagtcatttccagatacgcttgagtcatttccaga

SEQ ID NO: 5205 - DNA, 142 bp, synthetic construct
  source 1..142: mol_type = other DNA
tctggaaatgactcatgatcttctggaaatgactcatacgcttctggaaatgactcatgccgcttctggaaatgactcatgcttttctggaaatgactcatgatcttctggaaatgactcatacgcttctggaaatgactca

SEQ ID NO: 5206 - DNA, 142 bp, synthetic construct
  source 1..142: mol_type = other DNA
tgagtcatttccgaatgatcttgagtcatttccgaatacgcttgagtcatttccgaatgccgcttgagtcatttccgaatgcttttgagtcatttccgaatgatcttgagtcatttccgaatacgcttgagtcatttccgaa

SEQ ID NO: 5207 - DNA, 142 bp, synthetic construct
  source 1..142: mol_type = other DNA
ttcggaaatgactcatgatctttcggaaatgactcatacgctttcggaaatgactcatgccgctttcggaaatgactcatgctttttcggaaatgactcatgatctttcggaaatgactcatacgctttcggaaatgactca

SEQ ID NO: 5208 - DNA, 142 bp, synthetic construct
  source 1..142: mol_type = other DNA
tgagtcatttccggatgatcttgagtcatttccggatacgcttgagtcatttccggatgccgcttgagtcatttccggatgcttttgagtcatttccggatgatcttgagtcatttccggatacgcttgagtcatttccgga

SEQ ID NO: 5209 - DNA, 142 bp, synthetic construct
  source 1..142: mol_type = other DNA
tccggaaatgactcatgatcttccggaaatgactcatacgcttccggaaatgactcatgccgcttccggaaatgactcatgcttttccggaaatgactcatgatcttccggaaatgactcatacgcttccggaaatgactca

SEQ ID NO: 5210 - DNA, 142 bp, synthetic construct
  source 1..142: mol_type = other DNA
tgagtcattttcaaatgatcttgagtcattttcaaatacgcttgagtcattttcaaatgccgcttgagtcattttcaaatgcttttgagtcattttcaaatgatcttgagtcattttcaaatacgcttgagtcattttcaaa

SEQ ID NO: 5211 - DNA, 142 bp, synthetic construct
  source 1..142: mol_type = other DNA
tttgaaaatgactcatgatcttttgaaaatgactcatacgcttttgaaaatgactcatgccgcttttgaaaatgactcatgcttttttgaaaatgactcatgatcttttgaaaatgactcatacgcttttgaaaatgactca

SEQ ID NO: 5212 - DNA, 142 bp, synthetic construct
  source 1..142: mol_type = other DNA
tgagtcattttcagatgatcttgagtcattttcagatacgcttgagtcattttcagatgccgcttgagtcattttcagatgcttttgagtcattttcagatgatcttgagtcattttcagatacgcttgagtcattttcaga

SEQ ID NO: 5213 - DNA, 142 bp, synthetic construct
  source 1..142: mol_type = other DNA
tctgaaaatgactcatgatcttctgaaaatgactcatacgcttctgaaaatgactcatgccgcttctgaaaatgactcatgcttttctgaaaatgactcatgatcttctgaaaatgactcatacgcttctgaaaatgactca

SEQ ID NO: 5214 - DNA, 142 bp, synthetic construct
  source 1..142: mol_type = other DNA
tgagtcattttcgaatgatcttgagtcattttcgaatacgcttgagtcattttcgaatgccgcttgagtcattttcgaatgcttttgagtcattttcgaatgatcttgagtcattttcgaatacgcttgagtcattttcgaa

SEQ ID NO: 5215 - DNA, 142 bp, synthetic construct
  source 1..142: mol_type = other DNA
ttcgaaaatgactcatgatctttcgaaaatgactcatacgctttcgaaaatgactcatgccgctttcgaaaatgactcatgctttttcgaaaatgactcatgatctttcgaaaatgactcatacgctttcgaaaatgactca

SEQ ID NO: 5216 - DNA, 142 bp, synthetic construct
  source 1..142: mol_type = other DNA
tgagtcattttcggatgatcttgagtcattttcggatacgcttgagtcattttcggatgccgcttgagtcattttcggatgcttttgagtcattttcggatgatcttgagtcattttcggatacgcttgagtcattttcgga

SEQ ID NO: 5217 - DNA, 142 bp, synthetic construct
  source 1..142: mol_type = other DNA
tccgaaaatgactcatgatcttccgaaaatgactcatacgcttccgaaaatgactcatgccgcttccgaaaatgactcatgcttttccgaaaatgactcatgatcttccgaaaatgactcatacgcttccgaaaatgactca

SEQ ID NO: 5218 - DNA, 142 bp, synthetic construct
  source 1..142: mol_type = other DNA
tgactcatatccaaatgatcttgactcatatccaaatacgcttgactcatatccaaatgccgcttgactcatatccaaatgcttttgactcatatccaaatgatcttgactcatatccaaatacgcttgactcatatccaaa

SEQ ID NO: 5219 - DNA, 142 bp, synthetic construct
  source 1..142: mol_type = other DNA
tttggatatgagtcatgatcttttggatatgagtcatacgcttttggatatgagtcatgccgcttttggatatgagtcatgcttttttggatatgagtcatgatcttttggatatgagtcatacgcttttggatatgagtca

SEQ ID NO: 5220 - DNA, 142 bp, synthetic construct
  source 1..142: mol_type = other DNA
tgactcatatccagatgatcttgactcatatccagatacgcttgactcatatccagatgccgcttgactcatatccagatgcttttgactcatatccagatgatcttgactcatatccagatacgcttgactcatatccaga

SEQ ID NO: 5221 - DNA, 142 bp, synthetic construct
  source 1..142: mol_type = other DNA
tctggatatgagtcatgatcttctggatatgagtcatacgcttctggatatgagtcatgccgcttctggatatgagtcatgcttttctggatatgagtcatgatcttctggatatgagtcatacgcttctggatatgagtca

SEQ ID NO: 5222 - DNA, 142 bp, synthetic construct
  source 1..142: mol_type = other DNA
tgactcatatccgaatgatcttgactcatatccgaatacgcttgactcatatccgaatgccgcttgactcatatccgaatgcttttgactcatatccgaatgatcttgactcatatccgaatacgcttgactcatatccgaa

SEQ ID NO: 5223 - DNA, 142 bp, synthetic construct
  source 1..142: mol_type = other DNA
ttcggatatgagtcatgatctttcggatatgagtcatacgctttcggatatgagtcatgccgctttcggatatgagtcatgctttttcggatatgagtcatgatctttcggatatgagtcatacgctttcggatatgagtca

SEQ ID NO: 5224 - DNA, 142 bp, synthetic construct
  source 1..142: mol_type = other DNA
tgactcatatccggatgatcttgactcatatccggatacgcttgactcatatccggatgccgcttgactcatatccggatgcttttgactcatatccggatgatcttgactcatatccggatacgcttgactcatatccgga

SEQ ID NO: 5225 - DNA, 142 bp, synthetic construct
  source 1..142: mol_type = other DNA
tccggatatgagtcatgatcttccggatatgagtcatacgcttccggatatgagtcatgccgcttccggatatgagtcatgcttttccggatatgagtcatgatcttccggatatgagtcatacgcttccggatatgagtca

SEQ ID NO: 5226 - DNA, 142 bp, synthetic construct
  source 1..142: mol_type = other DNA
tgactcatattcaaatgatcttgactcatattcaaatacgcttgactcatattcaaatgccgcttgactcatattcaaatgcttttgactcatattcaaatgatcttgactcatattcaaatacgcttgactcatattcaaa

SEQ ID NO: 5227 - DNA, 142 bp, synthetic construct
  source 1..142: mol_type = other DNA
tttgaatatgagtcatgatcttttgaatatgagtcatacgcttttgaatatgagtcatgccgcttttgaatatgagtcatgcttttttgaatatgagtcatgatcttttgaatatgagtcatacgcttttgaatatgagtca

SEQ ID NO: 5228 - DNA, 142 bp, synthetic construct
  source 1..142: mol_type = other DNA
tgactcatattcagatgatcttgactcatattcagatacgcttgactcatattcagatgccgcttgactcatattcagatgcttttgactcatattcagatgatcttgactcatattcagatacgcttgactcatattcaga

SEQ ID NO: 5229 - DNA, 142 bp, synthetic construct
  source 1..142: mol_type = other DNA
tctgaatatgagtcatgatcttctgaatatgagtcatacgcttctgaatatgagtcatgccgcttctgaatatgagtcatgcttttctgaatatgagtcatgatcttctgaatatgagtcatacgcttctgaatatgagtca

SEQ ID NO: 5230 - DNA, 142 bp, synthetic construct
  source 1..142: mol_type = other DNA
tgactcatattcgaatgatcttgactcatattcgaatacgcttgactcatattcgaatgccgcttgactcatattcgaatgcttttgactcatattcgaatgatcttgactcatattcgaatacgcttgactcatattcgaa

SEQ ID NO: 5231 - DNA, 142 bp, synthetic construct
  source 1..142: mol_type = other DNA
ttcgaatatgagtcatgatctttcgaatatgagtcatacgctttcgaatatgagtcatgccgctttcgaatatgagtcatgctttttcgaatatgagtcatgatctttcgaatatgagtcatacgctttcgaatatgagtca

SEQ ID NO: 5232 - DNA, 142 bp, synthetic construct
  source 1..142: mol_type = other DNA
tgactcatattcggatgatcttgactcatattcggatacgcttgactcatattcggatgccgcttgactcatattcggatgcttttgactcatattcggatgatcttgactcatattcggatacgcttgactcatattcgga

SEQ ID NO: 5233 - DNA, 142 bp, synthetic construct
  source 1..142: mol_type = other DNA
tccgaatatgagtcatgatcttccgaatatgagtcatacgcttccgaatatgagtcatgccgcttccgaatatgagtcatgcttttccgaatatgagtcatgatcttccgaatatgagtcatacgcttccgaatatgagtca

SEQ ID NO: 5234 - DNA, 142 bp, synthetic construct
  source 1..142: mol_type = other DNA
tgactcatttccaaatgatcttgactcatttccaaatacgcttgactcatttccaaatgccgcttgactcatttccaaatgcttttgactcatttccaaatgatcttgactcatttccaaatacgcttgactcatttccaaa

SEQ ID NO: 5235 - DNA, 142 bp, synthetic construct
  source 1..142: mol_type = other DNA
tttggaaatgagtcatgatcttttggaaatgagtcatacgcttttggaaatgagtcatgccgcttttggaaatgagtcatgcttttttggaaatgagtcatgatcttttggaaatgagtcatacgcttttggaaatgagtca

SEQ ID NO: 5236 - DNA, 142 bp, synthetic construct
  source 1..142: mol_type = other DNA
tgactcatttccagatgatcttgactcatttccagatacgcttgactcatttccagatgccgcttgactcatttccagatgcttttgactcatttccagatgatcttgactcatttccagatacgcttgactcatttccaga

SEQ ID NO: 5237 - DNA, 142 bp, synthetic construct
  source 1..142: mol_type = other DNA
tctggaaatgagtcatgatcttctggaaatgagtcatacgcttctggaaatgagtcatgccgcttctggaaatgagtcatgcttttctggaaatgagtcatgatcttctggaaatgagtcatacgcttctggaaatgagtca

SEQ ID NO: 5238 - DNA, 142 bp, synthetic construct
  source 1..142: mol_type = other DNA
tgactcatttccgaatgatcttgactcatttccgaatacgcttgactcatttccgaatgccgcttgactcatttccgaatgcttttgactcatttccgaatgatcttgactcatttccgaatacgcttgactcatttccgaa

SEQ ID NO: 5239 - DNA, 142 bp, synthetic construct
  source 1..142: mol_type = other DNA
ttcggaaatgagtcatgatctttcggaaatgagtcatacgctttcggaaatgagtcatgccgctttcggaaatgagtcatgctttttcggaaatgagtcatgatctttcggaaatgagtcatacgctttcggaaatgagtca

SEQ ID NO: 5240 - DNA, 142 bp, synthetic construct
  source 1..142: mol_type = other DNA
tgactcatttccggatgatcttgactcatttccggatacgcttgactcatttccggatgccgcttgactcatttccggatgcttttgactcatttccggatgatcttgactcatttccggatacgcttgactcatttccgga

SEQ ID NO: 5241 - DNA, 142 bp, synthetic construct
  source 1..142: mol_type = other DNA
tccggaaatgagtcatgatcttccggaaatgagtcatacgcttccggaaatgagtcatgccgcttccggaaatgagtcatgcttttccggaaatgagtcatgatcttccggaaatgagtcatacgcttccggaaatgagtca

SEQ ID NO: 5242 - DNA, 142 bp, synthetic construct
  source 1..142: mol_type = other DNA
tgactcattttcaaatgatcttgactcattttcaaatacgcttgactcattttcaaatgccgcttgactcattttcaaatgcttttgactcattttcaaatgatcttgactcattttcaaatacgcttgactcattttcaaa

SEQ ID NO: 5243 - DNA, 142 bp, synthetic construct
  source 1..142: mol_type = other DNA
tttgaaaatgagtcatgatcttttgaaaatgagtcatacgcttttgaaaatgagtcatgccgcttttgaaaatgagtcatgcttttttgaaaatgagtcatgatcttttgaaaatgagtcatacgcttttgaaaatgagtca

SEQ ID NO: 5244 - DNA, 142 bp, synthetic construct
  source 1..142: mol_type = other DNA
tgactcattttcagatgatcttgactcattttcagatacgcttgactcattttcagatgccgcttgactcattttcagatgcttttgactcattttcagatgatcttgactcattttcagatacgcttgactcattttcaga

SEQ ID NO: 5245 - DNA, 142 bp, synthetic construct
  source 1..142: mol_type = other DNA
tctgaaaatgagtcatgatcttctgaaaatgagtcatacgcttctgaaaatgagtcatgccgcttctgaaaatgagtcatgcttttctgaaaatgagtcatgatcttctgaaaatgagtcatacgcttctgaaaatgagtca

SEQ ID NO: 5246 - DNA, 142 bp, synthetic construct
  source 1..142: mol_type = other DNA
tgactcattttcgaatgatcttgactcattttcgaatacgcttgactcattttcgaatgccgcttgactcattttcgaatgcttttgactcattttcgaatgatcttgactcattttcgaatacgcttgactcattttcgaa

SEQ ID NO: 5247 - DNA, 142 bp, synthetic construct
  source 1..142: mol_type = other DNA
ttcgaaaatgagtcatgatctttcgaaaatgagtcatacgctttcgaaaatgagtcatgccgctttcgaaaatgagtcatgctttttcgaaaatgagtcatgatctttcgaaaatgagtcatacgctttcgaaaatgagtca

SEQ ID NO: 5248 - DNA, 142 bp, synthetic construct
  source 1..142: mol_type = other DNA
tgactcattttcggatgatcttgactcattttcggatacgcttgactcattttcggatgccgcttgactcattttcggatgcttttgactcattttcggatgatcttgactcattttcggatacgcttgactcattttcgga

SEQ ID NO: 5249 - DNA, 142 bp, synthetic construct
  source 1..142: mol_type = other DNA
tccgaaaatgagtcatgatcttccgaaaatgagtcatacgcttccgaaaatgagtcatgccgcttccgaaaatgagtcatgcttttccgaaaatgagtcatgatcttccgaaaatgagtcatacgcttccgaaaatgagtca

SEQ ID NO: 5250 - DNA, 140 bp, synthetic construct
  source 1..140: mol_type = other DNA
gatgagtcactgccgctgatgagtcactgctttgatgagtcactgatctgatgagtcactacgctgatgagtcactgccgctgatgagtcactgctttgatgagtcactgatctgatgagtcactacgctgatgagtcac

SEQ ID NO: 5251 - DNA, 140 bp, synthetic construct
  source 1..140: mol_type = other DNA
gtgactcatctgccgctgtgactcatctgctttgtgactcatctgatctgtgactcatctacgctgtgactcatctgccgctgtgactcatctgctttgtgactcatctgatctgtgactcatctacgctgtgactcatc

SEQ ID NO: 5252 - DNA, 140 bp, synthetic construct; identical to SEQ ID NO: 5150
  source 1..140: mol_type = other DNA

SEQ ID NO: 5253 - DNA, 140 bp, synthetic construct; identical to SEQ ID NO: 5151
  source 1..140: mol_type = other DNA

SEQ ID NO: 5254 - DNA, 140 bp, synthetic construct
  source 1..140: mol_type = other DNA
gatgactcactgccgctgatgactcactgctttgatgactcactgatctgatgactcactacgctgatgactcactgccgctgatgactcactgctttgatgactcactgatctgatgactcactacgctgatgactcac

SEQ ID NO: 5255 - DNA, 140 bp, synthetic construct
  source 1..140: mol_type = other DNA
gtgagtcatctgccgctgtgagtcatctgctttgtgagtcatctgatctgtgagtcatctacgctgtgagtcatctgccgctgtgagtcatctgctttgtgagtcatctgatctgtgagtcatctacgctgtgagtcatc

SEQ ID NO: 5256 - DNA, 140 bp, synthetic construct; identical to SEQ ID NO: 5152
  source 1..140: mol_type = other DNA

SEQ ID NO: 5257 - DNA, 140 bp, synthetic construct; identical to SEQ ID NO: 5153
  source 1..140: mol_type = other DNA

SEQ ID NO: 5258 - DNA, 140 bp, synthetic construct; identical to SEQ ID NO: 5146
  source 1..140: mol_type = other DNA

SEQ ID NO: 5259 - DNA, 140 bp, synthetic construct; identical to SEQ ID NO: 5147
  source 1..140: mol_type = other DNA

SEQ ID NO: 5260 - DNA, 140 bp, synthetic construct; identical to SEQ ID NO: 5148
  source 1..140: mol_type = other DNA

SEQ ID NO: 5261 - DNA, 140 bp, synthetic construct; identical to SEQ ID NO: 5149
  source 1..140: mol_type = other DNA

SEQ ID NO: 5262 - DNA, 140 bp, synthetic construct; identical to SEQ ID NO: 5150
  source 1..140: mol_type = other DNA

SEQ ID NO: 5263 - DNA, 140 bp, synthetic construct; identical to SEQ ID NO: 5151
  source 1..140: mol_type = other DNA

SEQ ID NO: 5264 - DNA, 140 bp, synthetic construct; identical to SEQ ID NO: 5152
  source 1..140: mol_type = other DNA

SEQ ID NO: 5265 - DNA, 140 bp, synthetic construct; identical to SEQ ID NO: 5153
  source 1..140: mol_type = other DNA

SEQ ID NO: 5266 - DNA, 140 bp, synthetic construct
  source 1..140: mol_type = other DNA
tatgagtcattgccgcttatgagtcattgcttttatgagtcattgatcttatgagtcattacgcttatgagtcattgccgcttatgagtcattgcttttatgagtcattgatcttatgagtcattacgcttatgagtcat

SEQ ID NO: 5267 - DNA, 140 bp, synthetic construct
  source 1..140: mol_type = other DNA
atgactcatatgccgctatgactcatatgctttatgactcatatgatctatgactcatatacgctatgactcatatgccgctatgactcatatgctttatgactcatatgatctatgactcatatacgctatgactcata

SEQ ID NO: 5268 - DNA, 140 bp, synthetic construct
  source 1..140: mol_type = other DNA
tatgactcattgccgcttatgactcattgcttttatgactcattgatcttatgactcattacgcttatgactcattgccgcttatgactcattgcttttatgactcattgatcttatgactcattacgcttatgactcat

SEQ ID NO: 5269 - DNA, 140 bp, synthetic construct
  source 1..140: mol_type = other DNA
atgagtcatatgccgctatgagtcatatgctttatgagtcatatgatctatgagtcatatacgctatgagtcatatgccgctatgagtcatatgctttatgagtcatatgatctatgagtcatatacgctatgagtcata

SEQ ID NO: 5270 - DNA, 149 bp, synthetic construct
  source 1..149: mol_type = other DNA
aatgagtcatatgccgctaatgagtcatatgctttaatgagtcatatgatctaatgagtcatatacgctaatgagtcatatgccgctaatgagtcatatgctttaatgagtcatatgatctaatgagtcatatacgctaatgagtcata

SEQ ID NO: 5271 - DNA, 149 bp, synthetic construct
  source 1..149: mol_type = other DNA
tatgactcatttgccgcttatgactcatttgcttttatgactcatttgatcttatgactcatttacgcttatgactcatttgccgcttatgactcatttgcttttatgactcatttgatcttatgactcatttacgcttatgactcatt

SEQ ID NO: 5272 - DNA, 149 bp, synthetic construct
  source 1..149: mol_type = other DNA
aatgagtcatctgccgctaatgagtcatctgctttaatgagtcatctgatctaatgagtcatctacgctaatgagtcatctgccgctaatgagtcatctgctttaatgagtcatctgatctaatgagtcatctacgctaatgagtcatc

SEQ ID NO: 5273 - DNA, 149 bp, synthetic construct
  source 1..149: mol_type = other DNA
gatgactcatttgccgctgatgactcatttgctttgatgactcatttgatctgatgactcatttacgctgatgactcatttgccgctgatgactcatttgctttgatgactcatttgatctgatgactcatttacgctgatgactcatt

SEQ ID NO: 5274 - DNA, 149 bp, synthetic construct
  source 1..149: mol_type = other DNA
aatgagtcatttgccgctaatgagtcatttgctttaatgagtcatttgatctaatgagtcatttacgctaatgagtcatttgccgctaatgagtcatttgctttaatgagtcatttgatctaatgagtcatttacgctaatgagtcatt

SEQ ID NO: 5275 - DNA, 149 bp, synthetic construct
  source 1..149: mol_type = other DNA
aatgactcatttgccgctaatgactcatttgctttaatgactcatttgatctaatgactcatttacgctaatgactcatttgccgctaatgactcatttgctttaatgactcatttgatctaatgactcatttacgctaatgactcatt

SEQ ID NO: 5276 - DNA, 149 bp, synthetic construct
  source 1..149: mol_type = other DNA
aatgactcatatgccgctaatgactcatatgctttaatgactcatatgatctaatgactcatatacgctaatgactcatatgccgctaatgactcatatgctttaatgactcatatgatctaatgactcatatacgctaatgactcata

SEQ ID NO: 5277 - DNA, 149 bp, synthetic construct
  source 1..149: mol_type = other DNA
tatgagtcatttgccgcttatgagtcatttgcttttatgagtcatttgatcttatgagtcatttacgcttatgagtcatttgccgcttatgagtcatttgcttttatgagtcatttgatcttatgagtcatttacgcttatgagtcatt

SEQ ID NO: 5278 - DNA, 149 bp, synthetic construct
  source 1..149: mol_type = other DNA
aatgactcatctgccgctaatgactcatctgctttaatgactcatctgatctaatgactcatctacgctaatgactcatctgccgctaatgactcatctgctttaatgactcatctgatctaatgactcatctacgctaatgactcatc

SEQ ID NO: 5279 - DNA, 149 bp, synthetic construct
  source 1..149: mol_type = other DNA
gatgagtcatttgccgctgatgagtcatttgctttgatgagtcatttgatctgatgagtcatttacgctgatgagtcatttgccgctgatgagtcatttgctttgatgagtcatttgatctgatgagtcatttacgctgatgagtcatt

SEQ ID NO: 5280 - DNA, 149 bp, synthetic construct; identical to SEQ ID NO: 5275
  source 1..149: mol_type = other DNA

SEQ ID NO: 5281 - DNA, 149 bp, synthetic construct; identical to SEQ ID NO: 5274
  source 1..149: mol_type = other DNA

SEQ ID NO: 5282 - DNA, 149 bp, synthetic construct
  source 1..149: mol_type = other DNA
gatgagtcatatgccgctgatgagtcatatgctttgatgagtcatatgatctgatgagtcatatacgctgatgagtcatatgccgctgatgagtcatatgctttgatgagtcatatgatctgatgagtcatatacgctgatgagtcata

SEQ ID NO: 5283 - DNA, 149 bp, synthetic construct
  source 1..149: mol_type = other DNA
tatgactcatctgccgcttatgactcatctgcttttatgactcatctgatcttatgactcatctacgcttatgactcatctgccgcttatgactcatctgcttttatgactcatctgatcttatgactcatctacgcttatgactcatc

SEQ ID NO: 5284 - DNA, 149 bp, synthetic construct
  source 1..149: mol_type = other DNA
gatgagtcatctgccgctgatgagtcatctgctttgatgagtcatctgatctgatgagtcatctacgctgatgagtcatctgccgctgatgagtcatctgctttgatgagtcatctgatctgatgagtcatctacgctgatgagtcatc

SEQ ID NO: 5285 - DNA, 149 bp, synthetic construct
  source 1..149: mol_type = other DNA
gatgactcatctgccgctgatgactcatctgctttgatgactcatctgatctgatgactcatctacgctgatgactcatctgccgctgatgactcatctgctttgatgactcatctgatctgatgactcatctacgctgatgactcatc

SEQ ID NO: 5286 - DNA, 149 bp, synthetic construct; identical to SEQ ID NO: 5279
  source 1..149: mol_type = other DNA

SEQ ID NO: 5287 - DNA, 149 bp, synthetic construct; identical to SEQ ID NO: 5278
  source 1..149: mol_type = other DNA

SEQ ID NO: 5288 - DNA, 149 bp, synthetic construct
  source 1..149: mol_type = other DNA
gatgactcatatgccgctgatgactcatatgctttgatgactcatatgatctgatgactcatatacgctgatgactcatatgccgctgatgactcatatgctttgatgactcatatgatctgatgactcatatacgctgatgactcata

SEQ ID NO: 5289 - DNA, 149 bp, synthetic construct
  source 1..149: mol_type = other DNA
tatgagtcatctgccgcttatgagtcatctgcttttatgagtcatctgatcttatgagtcatctacgcttatgagtcatctgccgcttatgagtcatctgcttttatgagtcatctgatcttatgagtcatctacgcttatgagtcatc

SEQ ID NO: 5290 - DNA, 149 bp, synthetic construct; identical to SEQ ID NO: 5285
  source 1..149: mol_type = other DNA

SEQ ID NO: 5291 - DNA, 149 bp, synthetic construct; identical to SEQ ID NO: 5284
  source 1..149: mol_type = other DNA

SEQ ID NO: 5292 - DNA, 149 bp, synthetic construct; identical to SEQ ID NO: 5273
  source 1..149: mol_type = other DNA

SEQ ID NO: 5293 - DNA, 149 bp, synthetic construct; identical to SEQ ID NO: 5272
  source 1..149: mol_type = other DNA

SEQ ID NO: 5294 - DNA, 149 bp, synthetic construct
  source 1..149: mol_type = other DNA
tatgagtcatatgccgcttatgagtcatatgcttttatgagtcatatgatcttatgagtcatatacgcttatgagtcatatgccgcttatgagtcatatgcttttatgagtcatatgatcttatgagtcatatacgcttatgagtcata

SEQ ID NO: 5295 - DNA, 149 bp, synthetic construct
  source 1..149: mol_type = other DNA
tatgactcatatgccgcttatgactcatatgcttttatgactcatatgatcttatgactcatatacgcttatgactcatatgccgcttatgactcatatgcttttatgactcatatgatcttatgactcatatacgcttatgactcata

SEQ ID NO: 5296 - DNA, 149 bp, synthetic construct; identical to SEQ ID NO: 5289
  source 1..149: mol_type = other DNA

SEQ ID NO: 5297 - DNA, 149 bp, synthetic construct; identical to SEQ ID NO: 5288
  source 1..149: mol_type = other DNA

SEQ ID NO: 5298 - DNA, 149 bp, synthetic construct; identical to SEQ ID NO: 5277
  source 1..149: mol_type = other DNA

SEQ ID NO: 5299 - DNA, 149 bp, synthetic construct; identical to SEQ ID NO: 5276
  source 1..149: mol_type = other DNA

SEQ ID NO: 5300 - DNA, 149 bp, synthetic construct; identical to SEQ ID NO: 5295
  source 1..149: mol_type = other DNA

SEQ ID NO: 5301 - DNA, 149 bp, synthetic construct; identical to SEQ ID NO: 5294
  source 1..149: mol_type = other DNA

SEQ ID NO: 5302 - DNA, 149 bp, synthetic construct; identical to SEQ ID NO: 5283
  source 1..149: mol_type = other DNA

SEQ ID NO: 5303 - DNA, 149 bp, synthetic construct; identical to SEQ ID NO: 5282
  source 1..149: mol_type = other DNA

SEQ ID NO: 5304 - DNA, 149 bp, synthetic construct; identical to SEQ ID NO: 5271
  source 1..149: mol_type = other DNA

SEQ ID NO: 5305 - DNA, 149 bp, synthetic construct; identical to SEQ ID NO: 5270
  source 1..149: mol_type = other DNA

SEQ ID NO: 5306 - DNA, 146 bp, synthetic construct
  source 1..146: mol_type = other DNA
atgactcactacgctatgactcactgccgctatgactcactgctttatgactcactgatctatgactcactacgctatgactcactgccgctatgactcactgctttatgactcactgatctatgactcactacgctatgactcac

SEQ ID NO: 5307 - DNA, 146 bp, synthetic construct
  source 1..146: mol_type = other DNA
gtgagtcattacgctgtgagtcattgccgctgtgagtcattgctttgtgagtcattgatctgtgagtcattacgctgtgagtcattgccgctgtgagtcattgctttgtgagtcattgatctgtgagtcattacgctgtgagtcat

SEQ ID NO: 5308 - DNA, 146 bp, synthetic construct
  source 1..146: mol_type = other DNA
atgactcattacgctatgactcattgccgctatgactcattgctttatgactcattgatctatgactcattacgctatgactcattgccgctatgactcattgctttatgactcattgatctatgactcattacgctatgactcat

SEQ ID NO: 5309 - DNA, 146 bp, synthetic construct
  source 1..146: mol_type = other DNA
atgagtcattacgctatgagtcattgccgctatgagtcattgctttatgagtcattgatctatgagtcattacgctatgagtcattgccgctatgagtcattgctttatgagtcattgatctatgagtcattacgctatgagtcat

SEQ ID NO: 5310 - DNA, 146 bp, synthetic construct; identical to SEQ ID NO: 5309
  source 1..146: mol_type = other DNA

SEQ ID NO: 5311 - DNA, 146 bp, synthetic construct; identical to SEQ ID NO: 5308
  source 1..146: mol_type = other DNA

SEQ ID NO: 5312 - DNA, 146 bp, synthetic construct; identical to SEQ ID NO: 5308
  source 1..146: mol_type = other DNA

SEQ ID NO: 5313 - DNA, 146 bp, synthetic construct; identical to SEQ ID NO: 5309
  source 1..146: mol_type = other DNA

SEQ ID NO: 5314 - DNA, 146 bp, synthetic construct; identical to SEQ ID NO: 5307
  source 1..146: mol_type = other DNA

SEQ ID NO: 5315 - DNA, 146 bp, synthetic construct; identical to SEQ ID NO: 5306
  source 1..146: mol_type = other DNA

SEQ ID NO: 5316 - DNA, 146 bp, synthetic construct
  source 1..146: mol_type = other DNA
gtgactcattacgctgtgactcattgccgctgtgactcattgctttgtgactcattgatctgtgactcattacgctgtgactcattgccgctgtgactcattgctttgtgactcattgatctgtgactcattacgctgtgactcat

SEQ ID NO: 5317 - DNA, 146 bp, synthetic construct
  source 1..146: mol_type = other DNA
atgagtcactacgctatgagtcactgccgctatgagtcactgctttatgagtcactgatctatgagtcactacgctatgagtcactgccgctatgagtcactgctttatgagtcactgatctatgagtcactacgctatgagtcac

SEQ ID NO: 5318 - DNA, 139 bp, synthetic construct
  source 1..139: mol_type = other DNA
ggatgactcatctgctttggatgactcatctgatctggatgactcatctacgctggatgactcatctgccgctggatgactcatctgctttggatgactcatctgatctggatgactcatctacgctggatgactcatc

SEQ ID NO: 5319 - DNA, 139 bp, synthetic construct
  source 1..139: mol_type = other DNA
gatgagtcatcctgctttgatgagtcatcctgatctgatgagtcatcctacgctgatgagtcatcctgccgctgatgagtcatcctgctttgatgagtcatcctgatctgatgagtcatcctacgctgatgagtcatcc

SEQ ID NO: 5320 - DNA, 142 bp, synthetic construct
  source 1..142: mol_type = other DNA
agacgaattgacagatgatctagacgaattgacagatacgctagacgaattgacagatgccgctagacgaattgacagatgctttagacgaattgacagatgatctagacgaattgacagatacgctagacgaattgacaga

SEQ ID NO: 5321 - DNA, 142 bp, synthetic construct
  source 1..142: mol_type = other DNA
tctgtcaattcgtcttgatcttctgtcaattcgtcttacgcttctgtcaattcgtcttgccgcttctgtcaattcgtcttgcttttctgtcaattcgtcttgatcttctgtcaattcgtcttacgcttctgtcaattcgtct

SEQ ID NO: 5322 - DNA, 142 bp, synthetic construct
  source 1..142: mol_type = other DNA
agacgaattgacagttgatctagacgaattgacagttacgctagacgaattgacagttgccgctagacgaattgacagttgctttagacgaattgacagttgatctagacgaattgacagttacgctagacgaattgacagt

SEQ ID NO: 5323 - DNA, 142 bp, synthetic construct
  source 1..142: mol_type = other DNA
actgtcaattcgtcttgatctactgtcaattcgtcttacgctactgtcaattcgtcttgccgctactgtcaattcgtcttgctttactgtcaattcgtcttgatctactgtcaattcgtcttacgctactgtcaattcgtct

SEQ ID NO: 5324 - DNA, 142 bp, synthetic construct
  source 1..142: mol_type = other DNA
agacgaattgacacatgatctagacgaattgacacatacgctagacgaattgacacatgccgctagacgaattgacacatgctttagacgaattgacacatgatctagacgaattgacacatacgctagacgaattgacaca

SEQ ID NO: 5325 - DNA, 142 bp, synthetic construct
  source 1..142: mol_type = other DNA
tgtgtcaattcgtcttgatcttgtgtcaattcgtcttacgcttgtgtcaattcgtcttgccgcttgtgtcaattcgtcttgcttttgtgtcaattcgtcttgatcttgtgtcaattcgtcttacgcttgtgtcaattcgtct

SEQ ID NO: 5326 - DNA, 142 bp, synthetic construct
  source 1..142: mol_type = other DNA
agacgaattgacacttgatctagacgaattgacacttacgctagacgaattgacacttgccgctagacgaattgacacttgctttagacgaattgacacttgatctagacgaattgacacttacgctagacgaattgacact

SEQ ID NO: 5327 - DNA, 142 bp, synthetic construct
  source 1..142: mol_type = other DNA
agtgtcaattcgtcttgatctagtgtcaattcgtcttacgctagtgtcaattcgtcttgccgctagtgtcaattcgtcttgctttagtgtcaattcgtcttgatctagtgtcaattcgtcttacgctagtgtcaattcgtct

SEQ ID NO: 5328 - DNA, 142 bp, synthetic construct
  source 1..142: mol_type = other DNA
agacgaattgactgatgatctagacgaattgactgatacgctagacgaattgactgatgccgctagacgaattgactgatgctttagacgaattgactgatgatctagacgaattgactgatacgctagacgaattgactga

SEQ ID NO: 5329 - DNA, 142 bp, synthetic construct
  source 1..142: mol_type = other DNA
tcagtcaattcgtcttgatcttcagtcaattcgtcttacgcttcagtcaattcgtcttgccgcttcagtcaattcgtcttgcttttcagtcaattcgtcttgatcttcagtcaattcgtcttacgcttcagtcaattcgtct

SEQ ID NO: 5330 - DNA, 142 bp, synthetic construct
  source 1..142: mol_type = other DNA
agacgaattgactgttgatctagacgaattgactgttacgctagacgaattgactgttgccgctagacgaattgactgttgctttagacgaattgactgttgatctagacgaattgactgttacgctagacgaattgactgt

SEQ ID NO: 5331 - DNA, 142 bp, synthetic construct
  source 1..142: mol_type = other DNA
acagtcaattcgtcttgatctacagtcaattcgtcttacgctacagtcaattcgtcttgccgctacagtcaattcgtcttgctttacagtcaattcgtcttgatctacagtcaattcgtcttacgctacagtcaattcgtct

SEQ ID NO: 5332 - DNA, 142 bp, synthetic construct
  source 1..142: mol_type = other DNA
agacgaattgactcatgatctagacgaattgactcatacgctagacgaattgactcatgccgctagacgaattgactcatgctttagacgaattgactcatgatctagacgaattgactcatacgctagacgaattgactca

SEQ ID NO: 5333 - DNA, 142 bp, synthetic construct
  source 1..142: mol_type = other DNA
tgagtcaattcgtcttgatcttgagtcaattcgtcttacgcttgagtcaattcgtcttgccgcttgagtcaattcgtcttgcttttgagtcaattcgtcttgatcttgagtcaattcgtcttacgcttgagtcaattcgtct

SEQ ID NO: 5334 - DNA, 142 bp, synthetic construct
  source 1..142: mol_type = other DNA
agacgaattgactcttgatctagacgaattgactcttacgctagacgaattgactcttgccgctagacgaattgactcttgctttagacgaattgactcttgatctagacgaattgactcttacgctagacgaattgactct

SEQ ID NO: 5335 - DNA, 142 bp, synthetic construct
  source 1..142: mol_type = other DNA
agagtcaattcgtcttgatctagagtcaattcgtcttacgctagagtcaattcgtcttgccgctagagtcaattcgtcttgctttagagtcaattcgtcttgatctagagtcaattcgtcttacgctagagtcaattcgtct

SEQ ID NO: 5336 - DNA, 142 bp, synthetic construct
  source 1..142: mol_type = other DNA
tgacgaattgacagatgatcttgacgaattgacagatacgcttgacgaattgacagatgccgcttgacgaattgacagatgcttttgacgaattgacagatgatcttgacgaattgacagatacgcttgacgaattgacaga

SEQ ID NO: 5337 - DNA, 142 bp, synthetic construct
  source 1..142: mol_type = other DNA
tctgtcaattcgtcatgatcttctgtcaattcgtcatacgcttctgtcaattcgtcatgccgcttctgtcaattcgtcatgcttttctgtcaattcgtcatgatcttctgtcaattcgtcatacgcttctgtcaattcgtca

SEQ ID NO: 5338 - DNA, 142 bp, synthetic construct
  source 1..142: mol_type = other DNA
tgacgaattgacagttgatcttgacgaattgacagttacgcttgacgaattgacagttgccgcttgacgaattgacagttgcttttgacgaattgacagttgatcttgacgaattgacagttacgcttgacgaattgacagt

SEQ ID NO: 5339 - DNA, 142 bp, synthetic construct
  source 1..142: mol_type = other DNA
actgtcaattcgtcatgatctactgtcaattcgtcatacgctactgtcaattcgtcatgccgctactgtcaattcgtcatgctttactgtcaattcgtcatgatctactgtcaattcgtcatacgctactgtcaattcgtca

SEQ ID NO: 5340 - DNA, 142 bp, synthetic construct
  source 1..142: mol_type = other DNA
tgacgaattgacacatgatcttgacgaattgacacatacgcttgacgaattgacacatgccgcttgacgaattgacacatgcttttgacgaattgacacatgatcttgacgaattgacacatacgcttgacgaattgacaca

SEQ ID NO: 5341 - DNA, 142 bp, synthetic construct
  source 1..142: mol_type = other DNA
tgtgtcaattcgtcatgatcttgtgtcaattcgtcatacgcttgtgtcaattcgtcatgccgcttgtgtcaattcgtcatgcttttgtgtcaattcgtcatgatcttgtgtcaattcgtcatacgcttgtgtcaattcgtca

SEQ ID NO: 5342 - DNA, 142 bp, synthetic construct
  source 1..142: mol_type = other DNA
tgacgaattgacacttgatcttgacgaattgacacttacgcttgacgaattgacacttgccgcttgacgaattgacacttgcttttgacgaattgacacttgatcttgacgaattgacacttacgcttgacgaattgacact

SEQ ID NO: 5343 - DNA, 142 bp, synthetic construct
  source 1..142: mol_type = other DNA
agtgtcaattcgtcatgatctagtgtcaattcgtcatacgctagtgtcaattcgtcatgccgctagtgtcaattcgtcatgctttagtgtcaattcgtcatgatctagtgtcaattcgtcatacgctagtgtcaattcgtca

SEQ ID NO: 5344 - DNA, 142 bp, synthetic construct
  source 1..142: mol_type = other DNA
tgacgaattgactgatgatcttgacgaattgactgatacgcttgacgaattgactgatgccgcttgacgaattgactgatgcttttgacgaattgactgatgatcttgacgaattgactgatacgcttgacgaattgactga

SEQ ID NO: 5345 - DNA, 142 bp, synthetic construct
  source 1..142: mol_type = other DNA
tcagtcaattcgtcatgatcttcagtcaattcgtcatacgcttcagtcaattcgtcatgccgcttcagtcaattcgtcatgcttttcagtcaattcgtcatgatcttcagtcaattcgtcatacgcttcagtcaattcgtca

SEQ ID NO: 5346 - DNA, 142 bp, synthetic construct
  source 1..142: mol_type = other DNA
tgacgaattgactgttgatcttgacgaattgactgttacgcttgacgaattgactgttgccgcttgacgaattgactgttgcttttgacgaattgactgttgatcttgacgaattgactgttacgcttgacgaattgactgt

SEQ ID NO: 5347 - DNA, 142 bp, synthetic construct
  source 1..142: mol_type = other DNA
acagtcaattcgtcatgatctacagtcaattcgtcatacgctacagtcaattcgtcatgccgctacagtcaattcgtcatgctttacagtcaattcgtcatgatctacagtcaattcgtcatacgctacagtcaattcgtca

SEQ ID NO: 5348 - DNA, 142 bp, synthetic construct
  source 1..142: mol_type = other DNA
tgacgaattgactcatgatcttgacgaattgactcatacgcttgacgaattgactcatgccgcttgacgaattgactcatgcttttgacgaattgactcatgatcttgacgaattgactcatacgcttgacgaattgactca

SEQ ID NO: 5349 - DNA, 142 bp, synthetic construct
  source 1..142: mol_type = other DNA
tgagtcaattcgtcatgatcttgagtcaattcgtcatacgcttgagtcaattcgtcatgccgcttgagtcaattcgtcatgcttttgagtcaattcgtcatgatcttgagtcaattcgtcatacgcttgagtcaattcgtca

SEQ ID NO: 5350 - DNA, 142 bp, synthetic construct
  source 1..142: mol_type = other DNA
tgacgaattgactcttgatcttgacgaattgactcttacgcttgacgaattgactcttgccgcttgacgaattgactcttgcttttgacgaattgactcttgatcttgacgaattgactcttacgcttgacgaattgactct

SEQ ID NO: 5351 - DNA, 142 bp, synthetic construct
  source 1..142: mol_type = other DNA
agagtcaattcgtcatgatctagagtcaattcgtcatacgctagagtcaattcgtcatgccgctagagtcaattcgtcatgctttagagtcaattcgtcatgatctagagtcaattcgtcatacgctagagtcaattcgtca

SEQ ID NO: 5352 - DNA, 146 bp, synthetic construct; identical to SEQ ID NO: 5317
  source 1..146: mol_type = other DNA

SEQ ID NO: 5353 - DNA, 146 bp, synthetic construct; identical to SEQ ID NO: 5316
  source 1..146: mol_type = other DNA

SEQ ID NO: 5354 - DNA, 146 bp, synthetic construct
  source 1..146: mol_type = other DNA
atgagtcagtacgctatgagtcagtgccgctatgagtcagtgctttatgagtcagtgatctatgagtcagtacgctatgagtcagtgccgctatgagtcagtgctttatgagtcagtgatctatgagtcagtacgctatgagtcag

SEQ ID NO: 5355 - DNA, 146 bp, synthetic construct
  source 1..146: mol_type = other DNA
ctgactcattacgctctgactcattgccgctctgactcattgctttctgactcattgatctctgactcattacgctctgactcattgccgctctgactcattgctttctgactcattgatctctgactcattacgctctgactcat

SEQ ID NO: 5356 - DNA, 146 bp, synthetic construct; identical to SEQ ID NO: 5309
  source 1..146: mol_type = other DNA

SEQ ID NO: 5357 - DNA, 146 bp, synthetic construct; identical to SEQ ID NO: 5308
  source 1..146: mol_type = other DNA

SEQ ID NO: 5358 - DNA, 146 bp, synthetic construct; identical to SEQ ID NO: 5306
  source 1..146: mol_type = other DNA

SEQ ID NO: 5359 - DNA, 146 bp, synthetic construct; identical to SEQ ID NO: 5307
  source 1..146: mol_type = other DNA

SEQ ID NO: 5360 - DNA, 146 bp, synthetic construct
  source 1..146: mol_type = other DNA
atgactcagtacgctatgactcagtgccgctatgactcagtgctttatgactcagtgatctatgactcagtacgctatgactcagtgccgctatgactcagtgctttatgactcagtgatctatgactcagtacgctatgactcag

SEQ ID NO: 5361 - DNA, 146 bp, synthetic construct
  source 1..146: mol_type = other DNA
ctgagtcattacgctctgagtcattgccgctctgagtcattgctttctgagtcattgatctctgagtcattacgctctgagtcattgccgctctgagtcattgctttctgagtcattgatctctgagtcattacgctctgagtcat

SEQ ID NO: 5362 - DNA, 146 bp, synthetic construct; identical to SEQ ID NO: 5308
  source 1..146: mol_type = other DNA

SEQ ID NO: 5363 - DNA, 146 bp, synthetic construct; identical to SEQ ID NO: 5309
  source 1..146: mol_type = other DNA

SEQ ID NO: 5364 - DNA, 140 bp, synthetic construct
  source 1..140: mol_type = other DNA
aatgagtcactgccgctaatgagtcactgctttaatgagtcactgatctaatgagtcactacgctaatgagtcactgccgctaatgagtcactgctttaatgagtcactgatctaatgagtcactacgctaatgagtcac

SEQ ID NO: 5365 - DNA, 140 bp, synthetic construct
  source 1..140: mol_type = other DNA
gtgactcatttgccgctgtgactcatttgctttgtgactcatttgatctgtgactcatttacgctgtgactcatttgccgctgtgactcatttgctttgtgactcatttgatctgtgactcatttacgctgtgactcatt

SEQ ID NO: 5366 - DNA, 140 bp, synthetic construct; identical to SEQ ID NO: 5146
  source 1..140: mol_type = other DNA

SEQ ID NO: 5367 - DNA, 140 bp, synthetic construct; identical to SEQ ID NO: 5147
  source 1..140: mol_type = other DNA

SEQ ID NO: 5368 - DNA, 140 bp, synthetic construct
  source 1..140: mol_type = other DNA
aatgactcactgccgctaatgactcactgctttaatgactcactgatctaatgactcactacgctaatgactcactgccgctaatgactcactgctttaatgactcactgatctaatgactcactacgctaatgactcac

SEQ ID NO: 5369 - DNA, 140 bp, synthetic construct
  source 1..140: mol_type = other DNA
gtgagtcatttgccgctgtgagtcatttgctttgtgagtcatttgatctgtgagtcatttacgctgtgagtcatttgccgctgtgagtcatttgctttgtgagtcatttgatctgtgagtcatttacgctgtgagtcatt

SEQ ID NO: 5370 - DNA, 140 bp, synthetic construct; identical to SEQ ID NO: 5148
  source 1..140: mol_type = other DNA

SEQ ID NO: 5371 - DNA, 140 bp, synthetic construct; identical to SEQ ID NO: 5149
  source 1..140: mol_type = other DNA

SEQ ID NO: 5372 - DNA, 140 bp, synthetic construct; identical to SEQ ID NO: 5250
  source 1..140: mol_type = other DNA

SEQ ID NO: 5373 - DNA, 140 bp, synthetic construct; identical to SEQ ID NO: 5251
  source 1..140: mol_type = other DNA

SEQ ID NO: 5374 - DNA, 140 bp, synthetic construct; identical to SEQ ID NO: 5150
  source 1..140: mol_type = other DNA

SEQ ID NO: 5375 - DNA, 140 bp, synthetic construct; identical to SEQ ID NO: 5151
  source 1..140: mol_type = other DNA

SEQ ID NO: 5376 - DNA, 140 bp, synthetic construct; identical to SEQ ID NO: 5254
  source 1..140: mol_type = other DNA

SEQ ID NO: 5377 - DNA, 140 bp, synthetic construct; identical to SEQ ID NO: 5255
  source 1..140: mol_type = other DNA

SEQ ID NO: 5378 - DNA, 140 bp, synthetic construct; identical to SEQ ID NO: 5152
  source 1..140: mol_type = other DNA

SEQ ID NO: 5379 - DNA, 140 bp, synthetic construct; identical to SEQ ID NO: 5153
  source 1..140: mol_type = other DNA

SEQ ID NO: 5380 - DNA, 140 bp, synthetic construct
  source 1..140: mol_type = other DNA
tatgagtcactgccgcttatgagtcactgcttttatgagtcactgatcttatgagtcactacgcttatgagtcactgccgcttatgagtcactgcttttatgagtcactgatcttatgagtcactacgcttatgagtcac

SEQ ID NO: 5381 - DNA, 140 bp, synthetic construct
  source 1..140: mol_type = other DNA
gtgactcatatgccgctgtgactcatatgctttgtgactcatatgatctgtgactcatatacgctgtgactcatatgccgctgtgactcatatgctttgtgactcatatgatctgtgactcatatacgctgtgactcata

SEQ ID NO: 5382 - DNA, 140 bp, synthetic construct; identical to SEQ ID NO: 5266
  source 1..140: mol_type = other DNA

SEQ ID NO: 5383 - DNA, 140 bp, synthetic construct; identical to SEQ ID NO: 5267
  source 1..140: mol_type = other DNA

SEQ ID NO: 5384 - DNA, 140 bp, synthetic construct
  source 1..140: mol_type = other DNA
tatgactcactgccgcttatgactcactgcttttatgactcactgatcttatgactcactacgcttatgactcactgccgcttatgactcactgcttttatgactcactgatcttatgactcactacgcttatgactcac

SEQ ID NO: 5385 - DNA, 140 bp, synthetic construct
  source 1..140: mol_type = other DNA
gtgagtcatatgccgctgtgagtcatatgctttgtgagtcatatgatctgtgagtcatatacgctgtgagtcatatgccgctgtgagtcatatgctttgtgagtcatatgatctgtgagtcatatacgctgtgagtcata

SEQ ID NO: 5386 - DNA, 140 bp, synthetic construct; identical to SEQ ID NO: 5268
  source 1..140: mol_type = other DNA

SEQ ID NO: 5387 - DNA, 140 bp, synthetic construct; identical to SEQ ID NO: 5269
  source 1..140: mol_type = other DNA

SEQ ID NO: 5388 - DNA, 142 bp, synthetic construct
  source 1..142: mol_type = other DNA
gttttattgactcactgatctgttttattgactcactacgctgttttattgactcactgccgctgttttattgactcactgctttgttttattgactcactgatctgttttattgactcactacgctgttttattgactcac

SEQ ID NO: 5389 - DNA, 142 bp, synthetic construct
  source 1..142: mol_type = other DNA
gtgagtcaataaaactgatctgtgagtcaataaaactacgctgtgagtcaataaaactgccgctgtgagtcaataaaactgctttgtgagtcaataaaactgatctgtgagtcaataaaactacgctgtgagtcaataaaac

SEQ ID NO: 5390 - DNA, 142 bp, synthetic construct
  source 1..142: mol_type = other DNA
gttttgttgactcactgatctgttttgttgactcactacgctgttttgttgactcactgccgctgttttgttgactcactgctttgttttgttgactcactgatctgttttgttgactcactacgctgttttgttgactcac

SEQ ID NO: 5391 - DNA, 142 bp, synthetic construct
  source 1..142: mol_type = other DNA
gtgagtcaacaaaactgatctgtgagtcaacaaaactacgctgtgagtcaacaaaactgccgctgtgagtcaacaaaactgctttgtgagtcaacaaaactgatctgtgagtcaacaaaactacgctgtgagtcaacaaaac

SEQ ID NO: 5392 - DNA, 149 bp, synthetic construct
  source 1..149: mol_type = other DNA
atcggccaacacggcatgatctatcggccaacacggcatacgctatcggccaacacggcatgccgctatcggccaacacggcatgctttatcggccaacacggcatgatctatcggccaacacggcatacgctatcggccaacacggca

SEQ ID NO: 5393 - DNA, 149 bp, synthetic construct
  source 1..149: mol_type = other DNA
tgccgtgttggccgattgatcttgccgtgttggccgattacgcttgccgtgttggccgattgccgcttgccgtgttggccgattgcttttgccgtgttggccgattgatcttgccgtgttggccgattacgcttgccgtgttggccgat

SEQ ID NO: 5394 - DNA, 149 bp, synthetic construct
  source 1..149: mol_type = other DNA
atcggccaactcggcatgatctatcggccaactcggcatacgctatcggccaactcggcatgccgctatcggccaactcggcatgctttatcggccaactcggcatgatctatcggccaactcggcatacgctatcggccaactcggca

SEQ ID NO: 5395 - DNA, 149 bp, synthetic construct
  source 1..149: mol_type = other DNA
tgccgagttggccgattgatcttgccgagttggccgattacgcttgccgagttggccgattgccgcttgccgagttggccgattgcttttgccgagttggccgattgatcttgccgagttggccgattacgcttgccgagttggccgat

SEQ ID NO: 5396 - DNA, 149 bp, synthetic construct
  source 1..149: mol_type = other DNA
atcggctaacacggcatgatctatcggctaacacggcatacgctatcggctaacacggcatgccgctatcggctaacacggcatgctttatcggctaacacggcatgatctatcggctaacacggcatacgctatcggctaacacggca

SEQ ID NO: 5397 - DNA, 149 bp, synthetic construct
  source 1..149: mol_type = other DNA
tgccgtgttagccgattgatcttgccgtgttagccgattacgcttgccgtgttagccgattgccgcttgccgtgttagccgattgcttttgccgtgttagccgattgatcttgccgtgttagccgattacgcttgccgtgttagccgat

SEQ ID NO: 5398 - DNA, 149 bp, synthetic construct
  source 1..149: mol_type = other DNA
atcggctaactcggcatgatctatcggctaactcggcatacgctatcggctaactcggcatgccgctatcggctaactcggcatgctttatcggctaactcggcatgatctatcggctaactcggcatacgctatcggctaactcggca

SEQ ID NO: 5399 - DNA, 149 bp, synthetic construct
  source 1..149: mol_type = other DNA
tgccgagttagccgattgatcttgccgagttagccgattacgcttgccgagttagccgattgccgcttgccgagttagccgattgcttttgccgagttagccgattgatcttgccgagttagccgattacgcttgccgagttagccgat

SEQ ID NO: 5400 - DNA, 149 bp, synthetic construct
  source 1..149: mol_type = other DNA
gtcggccaacacggcatgatctgtcggccaacacggcatacgctgtcggccaacacggcatgccgctgtcggccaacacggcatgctttgtcggccaacacggcatgatctgtcggccaacacggcatacgctgtcggccaacacggca

SEQ ID NO: 5401 - DNA, 149 bp, synthetic construct
  source 1..149: mol_type = other DNA
tgccgtgttggccgactgatcttgccgtgttggccgactacgcttgccgtgttggccgactgccgcttgccgtgttggccgactgcttttgccgtgttggccgactgatcttgccgtgttggccgactacgcttgccgtgttggccgac

SEQ ID NO: 5402 - DNA, 149 bp, synthetic construct
  source 1..149: mol_type = other DNA
gtcggccaactcggcatgatctgtcggccaactcggcatacgctgtcggccaactcggcatgccgctgtcggccaactcggcatgctttgtcggccaactcggcatgatctgtcggccaactcggcatacgctgtcggccaactcggca

SEQ ID NO: 5403 - DNA, 149 bp, synthetic construct
  source 1..149: mol_type = other DNA
tgccgagttggccgactgatcttgccgagttggccgactacgcttgccgagttggccgactgccgcttgccgagttggccgactgcttttgccgagttggccgactgatcttgccgagttggccgactacgcttgccgagttggccgac

SEQ ID NO: 5404 - DNA, 149 bp, synthetic construct
  source 1..149: mol_type = other DNA
gtcggctaacacggcatgatctgtcggctaacacggcatacgctgtcggctaacacggcatgccgctgtcggctaacacggcatgctttgtcggctaacacggcatgatctgtcggctaacacggcatacgctgtcggctaacacggca

SEQ ID NO: 5405 - DNA, 149 bp, synthetic construct
  source 1..149: mol_type = other DNA
tgccgtgttagccgactgatcttgccgtgttagccgactacgcttgccgtgttagccgactgccgcttgccgtgttagccgactgcttttgccgtgttagccgactgatcttgccgtgttagccgactacgcttgccgtgttagccgac

SEQ ID NO: 5406 - DNA, 149 bp, synthetic construct
  source 1..149: mol_type = other DNA
gtcggctaactcggcatgatctgtcggctaactcggcatacgctgtcggctaactcggcatgccgctgtcggctaactcggcatgctttgtcggctaactcggcatgatctgtcggctaactcggcatacgctgtcggctaactcggca

SEQ ID NO: 5407 - DNA, 149 bp, synthetic construct
  source 1..149: mol_type = other DNA
tgccgagttagccgactgatcttgccgagttagccgactacgcttgccgagttagccgactgccgcttgccgagttagccgactgcttttgccgagttagccgactgatcttgccgagttagccgactacgcttgccgagttagccgac

SEQ ID NO: 5408 - DNA, 134 bp, synthetic construct
  source 1..134: mol_type = other DNA
actctttctctgctgcaacacctgctgtctgctttactctttctctgctgcaacacctgctgtctgatctactctttctctgctgcaacacctgctgtctacgctactctttctctgctgcaacacctgctgtc

SEQ ID NO: 5409 - DNA, 134 bp, synthetic construct
  source 1..134: mol_type = other DNA
gacagcaggtgttgcagcagagaaagagttgctttgacagcaggtgttgcagcagagaaagagttgatctgacagcaggtgttgcagcagagaaagagttacgctgacagcaggtgttgcagcagagaaagagt

SEQ ID NO: 5410 - DNA, 134 bp, synthetic construct
  source 1..134: mol_type = other DNA
actctttctctgctgcaacacctgctgtttgctttactctttctctgctgcaacacctgctgtttgatctactctttctctgctgcaacacctgctgtttacgctactctttctctgctgcaacacctgctgtt

SEQ ID NO: 5411 - DNA, 134 bp, synthetic construct
  source 1..134: mol_type = other DNA
aacagcaggtgttgcagcagagaaagagttgctttaacagcaggtgttgcagcagagaaagagttgatctaacagcaggtgttgcagcagagaaagagttacgctaacagcaggtgttgcagcagagaaagagt

SEQ ID NO: 5412 - DNA, 134 bp, synthetic construct
  source 1..134: mol_type = other DNA
actctttctctgctgcaatacctgctgtctgctttactctttctctgctgcaatacctgctgtctgatctactctttctctgctgcaatacctgctgtctacgctactctttctctgctgcaatacctgctgtc

SEQ ID NO: 5413 - DNA, 134 bp, synthetic construct
  source 1..134: mol_type = other DNA
gacagcaggtattgcagcagagaaagagttgctttgacagcaggtattgcagcagagaaagagttgatctgacagcaggtattgcagcagagaaagagttacgctgacagcaggtattgcagcagagaaagagt

SEQ ID NO: 5414 - DNA, 134 bp, synthetic construct
  source 1..134: mol_type = other DNA
actctttctctgctgcaatacctgctgtttgctttactctttctctgctgcaatacctgctgtttgatctactctttctctgctgcaatacctgctgtttacgctactctttctctgctgcaatacctgctgtt

SEQ ID NO: 5415 - DNA, 134 bp, synthetic construct
  source 1..134: mol_type = other DNA
aacagcaggtattgcagcagagaaagagttgctttaacagcaggtattgcagcagagaaagagttgatctaacagcaggtattgcagcagagaaagagttacgctaacagcaggtattgcagcagagaaagagt

SEQ ID NO: 5416 - DNA, 146 bp, synthetic construct
  source 1..146: mol_type = other DNA
acatacatttacgctacatacatttgccgctacatacatttgctttacatacatttgatctacatacatttacgctacatacatttgccgctacatacatttgctttacatacatttgatctacatacatttacgctacatacatt

SEQ ID NO: 5417 - DNA, 146 bp, synthetic construct
  source 1..146: mol_type = other DNA
aatgtatgttacgctaatgtatgttgccgctaatgtatgttgctttaatgtatgttgatctaatgtatgttacgctaatgtatgttgccgctaatgtatgttgctttaatgtatgttgatctaatgtatgttacgctaatgtatgt

SEQ ID NO: 5418 - DNA, 146 bp, synthetic construct
  source 1..146: mol_type = other DNA
acatacgtttacgctacatacgtttgccgctacatacgtttgctttacatacgtttgatctacatacgtttacgctacatacgtttgccgctacatacgtttgctttacatacgtttgatctacatacgtttacgctacatacgtt

SEQ ID NO: 5419 - DNA, 146 bp, synthetic construct
  source 1..146: mol_type = other DNA
aacgtatgttacgctaacgtatgttgccgctaacgtatgttgctttaacgtatgttgatctaacgtatgttacgctaacgtatgttgccgctaacgtatgttgctttaacgtatgttgatctaacgtatgttacgctaacgtatgt

SEQ ID NO: 5420 - DNA, 146 bp, synthetic construct
  source 1..146: mol_type = other DNA
atatacatttacgctatatacatttgccgctatatacatttgctttatatacatttgatctatatacatttacgctatatacatttgccgctatatacatttgctttatatacatttgatctatatacatttacgctatatacatt

SEQ ID NO: 5421 - DNA, 146 bp, synthetic construct
  source 1..146: mol_type = other DNA
aatgtatattacgctaatgtatattgccgctaatgtatattgctttaatgtatattgatctaatgtatattacgctaatgtatattgccgctaatgtatattgctttaatgtatattgatctaatgtatattacgctaatgtatat

SEQ ID NO: 5422 - DNA, 146 bp, synthetic construct
  source 1..146: mol_type = other DNA
atatacgtttacgctatatacgtttgccgctatatacgtttgctttatatacgtttgatctatatacgtttacgctatatacgtttgccgctatatacgtttgctttatatacgtttgatctatatacgtttacgctatatacgtt

SEQ ID NO: 5423 - DNA, 146 bp, synthetic construct
  source 1..146: mol_type = other DNA
aacgtatattacgctaacgtatattgccgctaacgtatattgctttaacgtatattgatctaacgtatattacgctaacgtatattgccgctaacgtatattgctttaacgtatattgatctaacgtatattacgctaacgtatat

SEQ ID NO: 5424 - DNA, 146 bp, synthetic construct
  source 1..146: mol_type = other DNA
ccatacatttacgctccatacatttgccgctccatacatttgctttccatacatttgatctccatacatttacgctccatacatttgccgctccatacatttgctttccatacatttgatctccatacatttacgctccatacatt

SEQ ID NO: 5425 - DNA, 146 bp, synthetic construct
  source 1..146: mol_type = other DNA
aatgtatggtacgctaatgtatggtgccgctaatgtatggtgctttaatgtatggtgatctaatgtatggtacgctaatgtatggtgccgctaatgtatggtgctttaatgtatggtgatctaatgtatggtacgctaatgtatgg

SEQ ID NO: 5426 - DNA, 146 bp, synthetic construct
  source 1..146: mol_type = other DNA
ccatacgtttacgctccatacgtttgccgctccatacgtttgctttccatacgtttgatctccatacgtttacgctccatacgtttgccgctccatacgtttgctttccatacgtttgatctccatacgtttacgctccatacgtt

SEQ ID NO: 5427 - DNA, 146 bp, synthetic construct
  source 1..146: mol_type = other DNA
aacgtatggtacgctaacgtatggtgccgctaacgtatggtgctttaacgtatggtgatctaacgtatggtacgctaacgtatggtgccgctaacgtatggtgctttaacgtatggtgatctaacgtatggtacgctaacgtatgg

SEQ ID NO: 5428 - DNA, 146 bp, synthetic construct
  source 1..146: mol_type = other DNA
ctatacatttacgctctatacatttgccgctctatacatttgctttctatacatttgatctctatacatttacgctctatacatttgccgctctatacatttgctttctatacatttgatctctatacatttacgctctatacatt

SEQ ID NO: 5429 - DNA, 146 bp, synthetic construct
  source 1..146: mol_type = other DNA
aatgtatagtacgctaatgtatagtgccgctaatgtatagtgctttaatgtatagtgatctaatgtatagtacgctaatgtatagtgccgctaatgtatagtgctttaatgtatagtgatctaatgtatagtacgctaatgtatag

SEQ ID NO: 5430 - DNA, 146 bp, synthetic construct
  source 1..146: mol_type = other DNA
ctatacgtttacgctctatacgtttgccgctctatacgtttgctttctatacgtttgatctctatacgtttacgctctatacgtttgccgctctatacgtttgctttctatacgtttgatctctatacgtttacgctctatacgtt

SEQ ID NO: 5431 - DNA, 146 bp, synthetic construct
  source 1..146: mol_type = other DNA
aacgtatagtacgctaacgtatagtgccgctaacgtatagtgctttaacgtatagtgatctaacgtatagtacgctaacgtatagtgccgctaacgtatagtgctttaacgtatagtgatctaacgtatagtacgctaacgtatag

SEQ ID NO: 5432 - DNA, 140 bp, synthetic construct
  source 1..140: mol_type = other DNA
cgtctagacatgccgctcgtctagacatgctttcgtctagacatgatctcgtctagacatacgctcgtctagacatgccgctcgtctagacatgctttcgtctagacatgatctcgtctagacatacgctcgtctagaca

SEQ ID NO: 5433 - DNA, 140 bp, synthetic construct
  source 1..140: mol_type = other DNA
tgtctagacgtgccgcttgtctagacgtgcttttgtctagacgtgatcttgtctagacgtacgcttgtctagacgtgccgcttgtctagacgtgcttttgtctagacgtgatcttgtctagacgtacgcttgtctagacg

SEQ ID NO: 5434 - DNA, 140 bp, synthetic construct
  source 1..140: mol_type = other DNA
tgtctagacatgccgcttgtctagacatgcttttgtctagacatgatcttgtctagacatacgcttgtctagacatgccgcttgtctagacatgcttttgtctagacatgatcttgtctagacatacgcttgtctagaca

SEQ ID NO: 5435 - DNA, 140 bp, synthetic construct; identical to SEQ ID NO: 5434
  source 1..140: mol_type = other DNA

SEQ ID NO: 5436 - DNA, 140 bp, synthetic construct; identical to SEQ ID NO: 5269
  source 1..140: mol_type = other DNA

SEQ ID NO: 5437 - DNA, 140 bp, synthetic construct; identical to SEQ ID NO: 5268
  source 1..140: mol_type = other DNA

SEQ ID NO: 5438 - DNA, 140 bp, synthetic construct; identical to SEQ ID NO: 5153
  source 1..140: mol_type = other DNA

SEQ ID NO: 5439 - DNA, 140 bp, synthetic construct; identical to SEQ ID NO: 5152
  source 1..140: mol_type = other DNA

SEQ ID NO: 5440 - DNA, 140 bp, synthetic construct; identical to SEQ ID NO: 5149
  source 1..140: mol_type = other DNA

SEQ ID NO: 5441 - DNA, 140 bp, synthetic construct; identical to SEQ ID NO: 5148
  source 1..140: mol_type = other DNA

SEQ ID NO: 5442 - DNA, 140 bp, synthetic construct; identical to SEQ ID NO: 5267
  source 1..140: mol_type = other DNA

SEQ ID NO: 5443 - DNA, 140 bp, synthetic construct; identical to SEQ ID NO: 5266
  source 1..140: mol_type = other DNA

SEQ ID NO: 5444 - DNA, 140 bp, synthetic construct; identical to SEQ ID NO: 5151
  source 1..140: mol_type = other DNA

SEQ ID NO: 5445 - DNA, 140 bp, synthetic construct; identical to SEQ ID NO: 5150
  source 1..140: mol_type = other DNA

SEQ ID NO: 5446 - DNA, 140 bp, synthetic construct; identical to SEQ ID NO: 5147
  source 1..140: mol_type = other DNA

SEQ ID NO: 5447 - DNA, 140 bp, synthetic construct; identical to SEQ ID NO: 5146
  source 1..140: mol_type = other DNA

SEQ ID NO: 5448 - DNA, 149 bp, synthetic construct
  source 1..149: mol_type = other DNA
gaaatgagtcatgccgctgaaatgagtcatgctttgaaatgagtcatgatctgaaatgagtcatacgctgaaatgagtcatgccgctgaaatgagtcatgctttgaaatgagtcatgatctgaaatgagtcatacgctgaaatgagtca

SEQ ID NO: 5449 - DNA, 149 bp, synthetic construct
  source 1..149: mol_type = other DNA
tgactcatttctgccgcttgactcatttctgcttttgactcatttctgatcttgactcatttctacgcttgactcatttctgccgcttgactcatttctgcttttgactcatttctgatcttgactcatttctacgcttgactcatttc

SEQ ID NO: 5450 - DNA, 149 bp, synthetic construct; identical to SEQ ID NO: 5285
  source 1..149: mol_type = other DNA

SEQ ID NO: 5451 - DNA, 149 bp, synthetic construct; identical to SEQ ID NO: 5284
  source 1..149: mol_type = other DNA

SEQ ID NO: 5452 - DNA, 146 bp, synthetic construct; identical to SEQ ID NO: 5309
  source 1..146: mol_type = other DNA

SEQ ID NO: 5453 - DNA, 146 bp, synthetic construct; identical to SEQ ID NO: 5308
  source 1..146: mol_type = other DNA

SEQ ID NO: 5454 - DNA, 146 bp, synthetic construct; identical to SEQ ID NO: 5308
  source 1..146: mol_type = other DNA

SEQ ID NO: 5455 - DNA, 146 bp, synthetic construct; identical to SEQ ID NO: 5309
  source 1..146: mol_type = other DNA

SEQ ID NO: 5456 - DNA, 146 bp, synthetic construct
  source 1..146: mol_type = other DNA
atcgtaaaatacgctatcgtaaaatgccgctatcgtaaaatgctttatcgtaaaatgatctatcgtaaaatacgctatcgtaaaatgccgctatcgtaaaatgctttatcgtaaaatgatctatcgtaaaatacgctatcgtaaaa

SEQ ID NO: 5457 - DNA, 146 bp, synthetic construct
  source 1..146: mol_type = other DNA
ttttacgattacgctttttacgattgccgctttttacgattgctttttttacgattgatctttttacgattacgctttttacgattgccgctttttacgattgctttttttacgattgatctttttacgattacgctttttacgat

SEQ ID NO: 5458 - DNA, 146 bp, synthetic construct
  source 1..146: mol_type = other DNA
gtcgtaaaatacgctgtcgtaaaatgccgctgtcgtaaaatgctttgtcgtaaaatgatctgtcgtaaaatacgctgtcgtaaaatgccgctgtcgtaaaatgctttgtcgtaaaatgatctgtcgtaaaatacgctgtcgtaaaa

SEQ ID NO: 5459 - DNA, 146 bp, synthetic construct
  source 1..146: mol_type = other DNA
ttttacgactacgctttttacgactgccgctttttacgactgctttttttacgactgatctttttacgactacgctttttacgactgccgctttttacgactgctttttttacgactgatctttttacgactacgctttttacgac

SEQ ID NO: 5460 - DNA, 149 bp, synthetic construct
  source 1..149: mol_type = other DNA
atgagtcatcctgccgctatgagtcatcctgctttatgagtcatcctgatctatgagtcatcctacgctatgagtcatcctgccgctatgagtcatcctgctttatgagtcatcctgatctatgagtcatcctacgctatgagtcatcc

SEQ ID NO: 5461 - DNA, 149 bp, synthetic construct
  source 1..149: mol_type = other DNA
ggatgactcattgccgctggatgactcattgctttggatgactcattgatctggatgactcattacgctggatgactcattgccgctggatgactcattgctttggatgactcattgatctggatgactcattacgctggatgactcat

SEQ ID NO: 5462 - DNA, 149 bp, synthetic construct
  source 1..149: mol_type = other DNA
atgactcatcctgccgctatgactcatcctgctttatgactcatcctgatctatgactcatcctacgctatgactcatcctgccgctatgactcatcctgctttatgactcatcctgatctatgactcatcctacgctatgactcatcc

SEQ ID NO: 5463 - DNA, 149 bp, synthetic construct
  source 1..149: mol_type = other DNA
ggatgagtcattgccgctggatgagtcattgctttggatgagtcattgatctggatgagtcattacgctggatgagtcattgccgctggatgagtcattgctttggatgagtcattgatctggatgagtcattacgctggatgagtcat

SEQ ID NO: 5464 - DNA, 149 bp, synthetic construct
  source 1..149: mol_type = other DNA
gtgagtcatcctgccgctgtgagtcatcctgctttgtgagtcatcctgatctgtgagtcatcctacgctgtgagtcatcctgccgctgtgagtcatcctgctttgtgagtcatcctgatctgtgagtcatcctacgctgtgagtcatcc

SEQ ID NO: 5465 - DNA, 149 bp, synthetic construct
  source 1..149: mol_type = other DNA
ggatgactcactgccgctggatgactcactgctttggatgactcactgatctggatgactcactacgctggatgactcactgccgctggatgactcactgctttggatgactcactgatctggatgactcactacgctggatgactcac

SEQ ID NO: 5466 - DNA, 149 bp, synthetic construct
  source 1..149: mol_type = other DNA
gtgactcatcctgccgctgtgactcatcctgctttgtgactcatcctgatctgtgactcatcctacgctgtgactcatcctgccgctgtgactcatcctgctttgtgactcatcctgatctgtgactcatcctacgctgtgactcatcc

SEQ ID NO: 5467 - DNA, 149 bp, synthetic construct
  source 1..149: mol_type = other DNA
ggatgagtcactgccgctggatgagtcactgctttggatgagtcactgatctggatgagtcactacgctggatgagtcactgccgctggatgagtcactgctttggatgagtcactgatctggatgagtcactacgctggatgagtcac

SEQ ID NO: 5468 - DNA, 146 bp, synthetic construct
  source 1..146: mol_type = other DNA
cgaccaccgtacgctcgaccaccgtgccgctcgaccaccgtgctttcgaccaccgtgatctcgaccaccgtacgctcgaccaccgtgccgctcgaccaccgtgctttcgaccaccgtgatctcgaccaccgtacgctcgaccaccg

SEQ ID NO: 5469 - DNA, 146 bp, synthetic construct
  source 1..146: mol_type = other DNA
cggtggtcgtacgctcggtggtcgtgccgctcggtggtcgtgctttcggtggtcgtgatctcggtggtcgtacgctcggtggtcgtgccgctcggtggtcgtgctttcggtggtcgtgatctcggtggtcgtacgctcggtggtcg

SEQ ID NO: 5470 - DNA, 147 bp, synthetic construct
  source 1..147: mol_type = other DNA
atgaataattaattgctttatgaataattaattgatctatgaataattaattacgctatgaataattaattgccgctatgaataattaattgctttatgaataattaattgatctatgaataattaattacgctatgaataattaat

SEQ ID NO: 5471 - DNA, 147 bp, synthetic construct
  source 1..147: mol_type = other DNA
attaattattcattgctttattaattattcattgatctattaattattcattacgctattaattattcattgccgctattaattattcattgctttattaattattcattgatctattaattattcattacgctattaattattcat

SEQ ID NO: 5472 - DNA, 147 bp, synthetic construct
  source 1..147: mol_type = other DNA
atgaatatttaattgctttatgaatatttaattgatctatgaatatttaattacgctatgaatatttaattgccgctatgaatatttaattgctttatgaatatttaattgatctatgaatatttaattacgctatgaatatttaat

SEQ ID NO: 5473 - DNA, 147 bp, synthetic construct
  source 1..147: mol_type = other DNA
attaaatattcattgctttattaaatattcattgatctattaaatattcattacgctattaaatattcattgccgctattaaatattcattgctttattaaatattcattgatctattaaatattcattacgctattaaatattcat

SEQ ID NO: 5474 - DNA, 147 bp, synthetic construct
  source 1..147: mol_type = other DNA
atgcataattaattgctttatgcataattaattgatctatgcataattaattacgctatgcataattaattgccgctatgcataattaattgctttatgcataattaattgatctatgcataattaattacgctatgcataattaat

SEQ ID NO: 5475 - DNA, 147 bp, synthetic construct
  source 1..147: mol_type = other DNA
attaattatgcattgctttattaattatgcattgatctattaattatgcattacgctattaattatgcattgccgctattaattatgcattgctttattaattatgcattgatctattaattatgcattacgctattaattatgcat

SEQ ID NO: 5476 - DNA, 147 bp, synthetic construct
  source 1..147: mol_type = other DNA
atgcatatttaattgctttatgcatatttaattgatctatgcatatttaattacgctatgcatatttaattgccgctatgcatatttaattgctttatgcatatttaattgatctatgcatatttaattacgctatgcatatttaat

SEQ ID NO: 5477 - DNA, 147 bp, synthetic construct
  source 1..147: mol_type = other DNA
attaaatatgcattgctttattaaatatgcattgatctattaaatatgcattacgctattaaatatgcattgccgctattaaatatgcattgctttattaaatatgcattgatctattaaatatgcattacgctattaaatatgcat

SEQ ID NO: 5478 - DNA, 146 bp, synthetic construct
  source 1..146: mol_type = other DNA
aactggttttacgctaactggttttgccgctaactggttttgctttaactggttttgatctaactggttttacgctaactggttttgccgctaactggttttgctttaactggttttgatctaactggttttacgctaactggttt

SEQ ID NO: 5479 - DNA, 146 bp, synthetic construct
  source 1..146: mol_type = other DNA
aaaccagtttacgctaaaccagtttgccgctaaaccagtttgctttaaaccagtttgatctaaaccagtttacgctaaaccagtttgccgctaaaccagtttgctttaaaccagtttgatctaaaccagtttacgctaaaccagtt

SEQ ID NO: 5480 - DNA, 149 bp, synthetic construct
  source 1..149: mol_type = other DNA
cgaccaccgaatgccgctcgaccaccgaatgctttcgaccaccgaatgatctcgaccaccgaatacgctcgaccaccgaatgccgctcgaccaccgaatgctttcgaccaccgaatgatctcgaccaccgaatacgctcgaccaccgaa

SEQ ID NO: 5481 - DNA, 149 bp, synthetic construct
  source 1..149: mol_type = other DNA
ttcggtggtcgtgccgctttcggtggtcgtgctttttcggtggtcgtgatctttcggtggtcgtacgctttcggtggtcgtgccgctttcggtggtcgtgctttttcggtggtcgtgatctttcggtggtcgtacgctttcggtggtcg

SEQ ID NO: 5482 - DNA, 135 bp, synthetic construct
  source 1..135: mol_type = other DNA
aaagtcaaaagtcatgatctaaagtcaaaagtcatacgctaaagtcaaaagtcatgccgctaaagtcaaaagtcatgctttaaagtcaaaagtcatgatctaaagtcaaaagtcatacgctaaagtcaaaagtca

SEQ ID NO: 5483 - DNA, 135 bp, synthetic construct
  source 1..135: mol_type = other DNA
tgacttttgacttttgatcttgacttttgacttttacgcttgacttttgacttttgccgcttgacttttgacttttgcttttgacttttgacttttgatcttgacttttgacttttacgcttgacttttgacttt

SEQ ID NO: 5484 - DNA, 146 bp, synthetic construct; identical to SEQ ID NO: 5458
  source 1..146: mol_type = other DNA

SEQ ID NO: 5485 - DNA, 146 bp, synthetic construct; identical to SEQ ID NO: 5459
  source 1..146: mol_type = other DNA

SEQ ID NO: 5486 - DNA, 136 bp, synthetic construct
  source 1..136: mol_type = other DNA
aggtgtgatacgctaggtgtgatgccgctaggtgtgatgctttaggtgtgatgatctaggtgtgatacgctaggtgtgatgccgctaggtgtgatgctttaggtgtgatgatctaggtgtgatacgctaggtgtga

SEQ ID NO: 5487 - DNA, 136 bp, synthetic construct
  source 1..136: mol_type = other DNA
tcacaccttacgcttcacaccttgccgcttcacaccttgcttttcacaccttgatcttcacaccttacgcttcacaccttgccgcttcacaccttgcttttcacaccttgatcttcacaccttacgcttcacacct

SEQ ID NO: 5488 - DNA, 136 bp, synthetic construct
  source 1..136: mol_type = other DNA
aggtgtcatacgctaggtgtcatgccgctaggtgtcatgctttaggtgtcatgatctaggtgtcatacgctaggtgtcatgccgctaggtgtcatgctttaggtgtcatgatctaggtgtcatacgctaggtgtca

SEQ ID NO: 5489 - DNA, 136 bp, synthetic construct
  source 1..136: mol_type = other DNA
tgacaccttacgcttgacaccttgccgcttgacaccttgcttttgacaccttgatcttgacaccttacgcttgacaccttgccgcttgacaccttgcttttgacaccttgatcttgacaccttacgcttgacacct

SEQ ID NO: 5490 - DNA, 139 bp, synthetic construct
  source 1..139: mol_type = other DNA
actcacaggccctgctttactcacaggccctgatctactcacaggccctacgctactcacaggccctgccgctactcacaggccctgctttactcacaggccctgatctactcacaggccctacgctactcacaggccc

SEQ ID NO: 5491 - DNA, 139 bp, synthetic construct
  source 1..139: mol_type = other DNA
gggcctgtgagttgctttgggcctgtgagttgatctgggcctgtgagttacgctgggcctgtgagttgccgctgggcctgtgagttgctttgggcctgtgagttgatctgggcctgtgagttacgctgggcctgtgagt

SEQ ID NO: 5492 - DNA, 139 bp, synthetic construct
  source 1..139: mol_type = other DNA
actcacaggtcctgctttactcacaggtcctgatctactcacaggtcctacgctactcacaggtcctgccgctactcacaggtcctgctttactcacaggtcctgatctactcacaggtcctacgctactcacaggtcc

SEQ ID NO: 5493 - DNA, 139 bp, synthetic construct
  source 1..139: mol_type = other DNA
ggacctgtgagttgctttggacctgtgagttgatctggacctgtgagttacgctggacctgtgagttgccgctggacctgtgagttgctttggacctgtgagttgatctggacctgtgagttacgctggacctgtgagt

SEQ ID NO: 5494 - DNA, 139 bp, synthetic construct
  source 1..139: mol_type = other DNA
gctcacaggccctgctttgctcacaggccctgatctgctcacaggccctacgctgctcacaggccctgccgctgctcacaggccctgctttgctcacaggccctgatctgctcacaggccctacgctgctcacaggccc

SEQ ID NO: 5495 - DNA, 139 bp, synthetic construct
  source 1..139: mol_type = other DNA
gggcctgtgagctgctttgggcctgtgagctgatctgggcctgtgagctacgctgggcctgtgagctgccgctgggcctgtgagctgctttgggcctgtgagctgatctgggcctgtgagctacgctgggcctgtgagc

SEQ ID NO: 5496 - DNA, 139 bp, synthetic construct
  source 1..139: mol_type = other DNA
gctcacaggtcctgctttgctcacaggtcctgatctgctcacaggtcctacgctgctcacaggtcctgccgctgctcacaggtcctgctttgctcacaggtcctgatctgctcacaggtcctacgctgctcacaggtcc

SEQ ID NO: 5497 - DNA, 139 bp, synthetic construct
  source 1..139: mol_type = other DNA
ggacctgtgagctgctttggacctgtgagctgatctggacctgtgagctacgctggacctgtgagctgccgctggacctgtgagctgctttggacctgtgagctgatctggacctgtgagctacgctggacctgtgagc

SEQ ID NO: 5498 - DNA, 139 bp, synthetic construct
  source 1..139: mol_type = other DNA
gtcatcatgatctgtcatcatacgctgtcatcatgccgctgtcatcatgctttgtcatcatgatctgtcatcatacgctgtcatcatgccgctgtcatcatgctttgtcatcatgatctgtcatcatacgctgtcatca

SEQ ID NO: 5499 - DNA, 139 bp, synthetic construct
  source 1..139: mol_type = other DNA
tgatgactgatcttgatgactacgcttgatgactgccgcttgatgactgcttttgatgactgatcttgatgactacgcttgatgactgccgcttgatgactgcttttgatgactgatcttgatgactacgcttgatgac

SEQ ID NO: 5500 - DNA, 139 bp, synthetic construct
  source 1..139: mol_type = other DNA
gtcatcgtgatctgtcatcgtacgctgtcatcgtgccgctgtcatcgtgctttgtcatcgtgatctgtcatcgtacgctgtcatcgtgccgctgtcatcgtgctttgtcatcgtgatctgtcatcgtacgctgtcatcg

SEQ ID NO: 5501 - DNA, 139 bp, synthetic construct
  source 1..139: mol_type = other DNA
cgatgactgatctcgatgactacgctcgatgactgccgctcgatgactgctttcgatgactgatctcgatgactacgctcgatgactgccgctcgatgactgctttcgatgactgatctcgatgactacgctcgatgac

SEQ ID NO: 5502 - DNA, 146 bp, synthetic construct
  source 1..146: mol_type = other DNA
tttaacgactacgcttttaacgactgccgcttttaacgactgcttttttaacgactgatcttttaacgactacgcttttaacgactgccgcttttaacgactgcttttttaacgactgatcttttaacgactacgcttttaacgac

SEQ ID NO: 5503 - DNA, 146 bp, synthetic construct
  source 1..146: mol_type = other DNA
gtcgttaaatacgctgtcgttaaatgccgctgtcgttaaatgctttgtcgttaaatgatctgtcgttaaatacgctgtcgttaaatgccgctgtcgttaaatgctttgtcgttaaatgatctgtcgttaaatacgctgtcgttaaa

SEQ ID NO: 5504 - DNA, 146 bp, synthetic construct; identical to SEQ ID NO: 5459
  source 1..146: mol_type = other DNA

SEQ ID NO: 5505 - DNA, 146 bp, synthetic construct; identical to SEQ ID NO: 5458
  source 1..146: mol_type = other DNA

SEQ ID NO: 5506 - DNA, 140 bp, synthetic construct
  source 1..140: mol_type = other DNA
agtcgtaaaatgccgctagtcgtaaaatgctttagtcgtaaaatgatctagtcgtaaaatacgctagtcgtaaaatgccgctagtcgtaaaatgctttagtcgtaaaatgatctagtcgtaaaatacgctagtcgtaaaa

SEQ ID NO: 5507 - DNA, 140 bp, synthetic construct
  source 1..140: mol_type = other DNA
ttttacgacttgccgctttttacgacttgctttttttacgacttgatctttttacgacttacgctttttacgacttgccgctttttacgacttgctttttttacgacttgatctttttacgacttacgctttttacgact

SEQ ID NO: 5508 - DNA, 140 bp, synthetic construct
  source 1..140: mol_type = other DNA
ggtcgtaaaatgccgctggtcgtaaaatgctttggtcgtaaaatgatctggtcgtaaaatacgctggtcgtaaaatgccgctggtcgtaaaatgctttggtcgtaaaatgatctggtcgtaaaatacgctggtcgtaaaa

SEQ ID NO: 5509 - DNA, 140 bp, synthetic construct
  source 1..140: mol_type = other DNA
ttttacgacctgccgctttttacgacctgctttttttacgacctgatctttttacgacctacgctttttacgacctgccgctttttacgacctgctttttttacgacctgatctttttacgacctacgctttttacgacc

SEQ ID NO: 5510 - DNA, 140 bp, synthetic construct
  source 1..140: mol_type = other DNA
ggtgagtcattgccgctggtgagtcattgctttggtgagtcattgatctggtgagtcattacgctggtgagtcattgccgctggtgagtcattgctttggtgagtcattgatctggtgagtcattacgctggtgagtcat

SEQ ID NO: 5511 - DNA, 140 bp, synthetic construct
  source 1..140: mol_type = other DNA
atgactcacctgccgctatgactcacctgctttatgactcacctgatctatgactcacctacgctatgactcacctgccgctatgactcacctgctttatgactcacctgatctatgactcacctacgctatgactcacc

SEQ ID NO: 5512 - DNA, 140 bp, synthetic construct
  source 1..140: mol_type = other DNA
ggtgactcattgccgctggtgactcattgctttggtgactcattgatctggtgactcattacgctggtgactcattgccgctggtgactcattgctttggtgactcattgatctggtgactcattacgctggtgactcat

SEQ ID NO: 5513 - DNA, 140 bp, synthetic construct
  source 1..140: mol_type = other DNA
atgagtcacctgccgctatgagtcacctgctttatgagtcacctgatctatgagtcacctacgctatgagtcacctgccgctatgagtcacctgctttatgagtcacctgatctatgagtcacctacgctatgagtcacc

SEQ ID NO: 5514 - DNA, 135 bp, synthetic construct
  source 1..135: mol_type = other DNA
cacatggcgcccaacatgggactgccgctcacatggcgcccaacatgggactgctttcacatggcgcccaacatgggactgatctcacatggcgcccaacatgggactacgctcacatggcgcccaacatgggac

SEQ ID NO: 5515 - DNA, 135 bp, synthetic construct
  source 1..135: mol_type = other DNA
gtcccatgttgggcgccatgtgtgccgctgtcccatgttgggcgccatgtgtgctttgtcccatgttgggcgccatgtgtgatctgtcccatgttgggcgccatgtgtacgctgtcccatgttgggcgccatgtg

SEQ ID NO: 5516 - DNA, 135 bp, synthetic construct
  source 1..135: mol_type = other DNA
cacatggcgcccaacattggactgccgctcacatggcgcccaacattggactgctttcacatggcgcccaacattggactgatctcacatggcgcccaacattggactacgctcacatggcgcccaacattggac

SEQ ID NO: 5517 - DNA, 135 bp, synthetic construct
  source 1..135: mol_type = other DNA
gtccaatgttgggcgccatgtgtgccgctgtccaatgttgggcgccatgtgtgctttgtccaatgttgggcgccatgtgtgatctgtccaatgttgggcgccatgtgtacgctgtccaatgttgggcgccatgtg

SEQ ID NO: 5518 - DNA, 146 bp, synthetic construct
  source 1..146: mol_type = other DNA
tgacgtcactacgcttgacgtcactgccgcttgacgtcactgcttttgacgtcactgatcttgacgtcactacgcttgacgtcactgccgcttgacgtcactgcttttgacgtcactgatcttgacgtcactacgcttgacgtcac

SEQ ID NO: 5519 - DNA, 146 bp, synthetic construct
  source 1..146: mol_type = other DNA
gtgacgtcatacgctgtgacgtcatgccgctgtgacgtcatgctttgtgacgtcatgatctgtgacgtcatacgctgtgacgtcatgccgctgtgacgtcatgctttgtgacgtcatgatctgtgacgtcatacgctgtgacgtca

SEQ ID NO: 5520 - DNA, 146 bp, synthetic construct
  source 1..146: mol_type = other DNA
tgacgtcattacgcttgacgtcattgccgcttgacgtcattgcttttgacgtcattgatcttgacgtcattacgcttgacgtcattgccgcttgacgtcattgcttttgacgtcattgatcttgacgtcattacgcttgacgtcat

SEQ ID NO: 5521 - DNA, 146 bp, synthetic construct
  source 1..146: mol_type = other DNA
atgacgtcatacgctatgacgtcatgccgctatgacgtcatgctttatgacgtcatgatctatgacgtcatacgctatgacgtcatgccgctatgacgtcatgctttatgacgtcatgatctatgacgtcatacgctatgacgtca

SEQ ID NO: 5522 - DNA, 146 bp, synthetic construct
  source 1..146: mol_type = other DNA
tggcgtcactacgcttggcgtcactgccgcttggcgtcactgcttttggcgtcactgatcttggcgtcactacgcttggcgtcactgccgcttggcgtcactgcttttggcgtcactgatcttggcgtcactacgcttggcgtcac

SEQ ID NO: 5523 - DNA, 146 bp, synthetic construct
  source 1..146: mol_type = other DNA
gtgacgccatacgctgtgacgccatgccgctgtgacgccatgctttgtgacgccatgatctgtgacgccatacgctgtgacgccatgccgctgtgacgccatgctttgtgacgccatgatctgtgacgccatacgctgtgacgcca

SEQ ID NO: 5524 - DNA, 146 bp, synthetic construct
  source 1..146: mol_type = other DNA
tggcgtcattacgcttggcgtcattgccgcttggcgtcattgcttttggcgtcattgatcttggcgtcattacgcttggcgtcattgccgcttggcgtcattgcttttggcgtcattgatcttggcgtcattacgcttggcgtcat

SEQ ID NO: 5525 - DNA, 146 bp, synthetic construct
  source 1..146: mol_type = other DNA
atgacgccatacgctatgacgccatgccgctatgacgccatgctttatgacgccatgatctatgacgccatacgctatgacgccatgccgctatgacgccatgctttatgacgccatgatctatgacgccatacgctatgacgcca

SEQ ID NO: 5526 - DNA, 146 bp, synthetic construct
  source 1..146: mol_type = other DNA
ttacgtcactacgctttacgtcactgccgctttacgtcactgctttttacgtcactgatctttacgtcactacgctttacgtcactgccgctttacgtcactgctttttacgtcactgatctttacgtcactacgctttacgtcac

SEQ ID NO: 5527 - DNA, 146 bp, synthetic construct
  source 1..146: mol_type = other DNA
gtgacgtaatacgctgtgacgtaatgccgctgtgacgtaatgctttgtgacgtaatgatctgtgacgtaatacgctgtgacgtaatgccgctgtgacgtaatgctttgtgacgtaatgatctgtgacgtaatacgctgtgacgtaa

SEQ ID NO: 5528 - DNA, 146 bp, synthetic construct
  source 1..146: mol_type = other DNA
ttacgtcattacgctttacgtcattgccgctttacgtcattgctttttacgtcattgatctttacgtcattacgctttacgtcattgccgctttacgtcattgctttttacgtcattgatctttacgtcattacgctttacgtcat

SEQ ID NO: 5529 - DNA, 146 bp, synthetic construct
  source 1..146: mol_type = other DNA
atgacgtaatacgctatgacgtaatgccgctatgacgtaatgctttatgacgtaatgatctatgacgtaatacgctatgacgtaatgccgctatgacgtaatgctttatgacgtaatgatctatgacgtaatacgctatgacgtaa

SEQ ID NO: 5530 - DNA, 146 bp, synthetic construct
  source 1..146: mol_type = other DNA
ttgcgtcactacgctttgcgtcactgccgctttgcgtcactgctttttgcgtcactgatctttgcgtcactacgctttgcgtcactgccgctttgcgtcactgctttttgcgtcactgatctttgcgtcactacgctttgcgtcac

SEQ ID NO: 5531 - DNA, 146 bp, synthetic construct
  source 1..146: mol_type = other DNA
gtgacgcaatacgctgtgacgcaatgccgctgtgacgcaatgctttgtgacgcaatgatctgtgacgcaatacgctgtgacgcaatgccgctgtgacgcaatgctttgtgacgcaatgatctgtgacgcaatacgctgtgacgcaa

SEQ ID NO: 5532 - DNA, 146 bp, synthetic construct
  source 1..146: mol_type = other DNA
ttgcgtcattacgctttgcgtcattgccgctttgcgtcattgctttttgcgtcattgatctttgcgtcattacgctttgcgtcattgccgctttgcgtcattgctttttgcgtcattgatctttgcgtcattacgctttgcgtcat

SEQ ID NO: 5533 - DNA, 146 bp, synthetic construct
  source 1..146: mol_type = other DNA
atgacgcaatacgctatgacgcaatgccgctatgacgcaatgctttatgacgcaatgatctatgacgcaatacgctatgacgcaatgccgctatgacgcaatgctttatgacgcaatgatctatgacgcaatacgctatgacgcaa

SEQ ID NO: 5534 - DNA, 135 bp, synthetic construct
  source 1..135: mol_type = other DNA
ttaaccctttagggtgatctttaaccctttagggtacgctttaaccctttagggtgccgctttaaccctttagggtgctttttaaccctttagggtgatctttaaccctttagggtacgctttaaccctttaggg

SEQ ID NO: 5535 - DNA, 135 bp, synthetic construct
  source 1..135: mol_type = other DNA
ccctaaagggttaatgatctccctaaagggttaatacgctccctaaagggttaatgccgctccctaaagggttaatgctttccctaaagggttaatgatctccctaaagggttaatacgctccctaaagggttaa

SEQ ID NO: 5536 - DNA, 135 bp, synthetic construct
  source 1..135: mol_type = other DNA
ttaaccctttaggttgatctttaaccctttaggttacgctttaaccctttaggttgccgctttaaccctttaggttgctttttaaccctttaggttgatctttaaccctttaggttacgctttaaccctttaggt

SEQ ID NO: 5537 - DNA, 135 bp, synthetic construct
  source 1..135: mol_type = other DNA
acctaaagggttaatgatctacctaaagggttaatacgctacctaaagggttaatgccgctacctaaagggttaatgctttacctaaagggttaatgatctacctaaagggttaatacgctacctaaagggttaa

SEQ ID NO: 5538 - DNA, 135 bp, synthetic construct
  source 1..135: mol_type = other DNA
ttaaccctttagtgtgatctttaaccctttagtgtacgctttaaccctttagtgtgccgctttaaccctttagtgtgctttttaaccctttagtgtgatctttaaccctttagtgtacgctttaaccctttagtg

SEQ ID NO: 5539 - DNA, 135 bp, synthetic construct
  source 1..135: mol_type = other DNA
cactaaagggttaatgatctcactaaagggttaatacgctcactaaagggttaatgccgctcactaaagggttaatgctttcactaaagggttaatgatctcactaaagggttaatacgctcactaaagggttaa

SEQ ID NO: 5540 - DNA, 135 bp, synthetic construct
  source 1..135: mol_type = other DNA
ttaaccctttagtttgatctttaaccctttagtttacgctttaaccctttagtttgccgctttaaccctttagtttgctttttaaccctttagtttgatctttaaccctttagtttacgctttaaccctttagtt

SEQ ID NO: 5541 - DNA, 135 bp, synthetic construct
  source 1..135: mol_type = other DNA
aactaaagggttaatgatctaactaaagggttaatacgctaactaaagggttaatgccgctaactaaagggttaatgctttaactaaagggttaatgatctaactaaagggttaatacgctaactaaagggttaa

SEQ ID NO: 5542 - DNA, 135 bp, synthetic construct
  source 1..135: mol_type = other DNA
ttaaccctttcgggtgatctttaaccctttcgggtacgctttaaccctttcgggtgccgctttaaccctttcgggtgctttttaaccctttcgggtgatctttaaccctttcgggtacgctttaaccctttcggg

SEQ ID NO: 5543 - DNA, 135 bp, synthetic construct
  source 1..135: mol_type = other DNA
cccgaaagggttaatgatctcccgaaagggttaatacgctcccgaaagggttaatgccgctcccgaaagggttaatgctttcccgaaagggttaatgatctcccgaaagggttaatacgctcccgaaagggttaa

SEQ ID NO: 5544 - DNA, 135 bp, synthetic construct
  source 1..135: mol_type = other DNA
ttaaccctttcggttgatctttaaccctttcggttacgctttaaccctttcggttgccgctttaaccctttcggttgctttttaaccctttcggttgatctttaaccctttcggttacgctttaaccctttcggt

SEQ ID NO: 5545 - DNA, 135 bp, synthetic construct
  source 1..135: mol_type = other DNA
accgaaagggttaatgatctaccgaaagggttaatacgctaccgaaagggttaatgccgctaccgaaagggttaatgctttaccgaaagggttaatgatctaccgaaagggttaatacgctaccgaaagggttaa

SEQ ID NO: 5546 - DNA, 135 bp, synthetic construct
  source 1..135: mol_type = other DNA
ttaaccctttcgtgtgatctttaaccctttcgtgtacgctttaaccctttcgtgtgccgctttaaccctttcgtgtgctttttaaccctttcgtgtgatctttaaccctttcgtgtacgctttaaccctttcgtg

SEQ ID NO: 5547 - DNA, 135 bp, synthetic construct
  source 1..135: mol_type = other DNA
cacgaaagggttaatgatctcacgaaagggttaatacgctcacgaaagggttaatgccgctcacgaaagggttaatgctttcacgaaagggttaatgatctcacgaaagggttaatacgctcacgaaagggttaa

SEQ ID NO: 5548 - DNA, 135 bp, synthetic construct
  source 1..135: mol_type = other DNA
ttaaccctttcgtttgatctttaaccctttcgtttacgctttaaccctttcgtttgccgctttaaccctttcgtttgctttttaaccctttcgtttgatctttaaccctttcgtttacgctttaaccctttcgtt

SEQ ID NO: 5549 - DNA, 135 bp, synthetic construct
  source 1..135: mol_type = other DNA
aacgaaagggttaatgatctaacgaaagggttaatacgctaacgaaagggttaatgccgctaacgaaagggttaatgctttaacgaaagggttaatgatctaacgaaagggttaatacgctaacgaaagggttaa

SEQ ID NO: 5550 - DNA, 135 bp, synthetic construct
  source 1..135: mol_type = other DNA
ttaaccctttggggtgatctttaaccctttggggtacgctttaaccctttggggtgccgctttaaccctttggggtgctttttaaccctttggggtgatctttaaccctttggggtacgctttaaccctttgggg

SEQ ID NO: 5551 - DNA, 135 bp, synthetic construct
  source 1..135: mol_type = other DNA
ccccaaagggttaatgatctccccaaagggttaatacgctccccaaagggttaatgccgctccccaaagggttaatgctttccccaaagggttaatgatctccccaaagggttaatacgctccccaaagggttaa

SEQ ID NO: 5552 - DNA, 135 bp, synthetic construct
  source 1..135: mol_type = other DNA
ttaaccctttgggttgatctttaaccctttgggttacgctttaaccctttgggttgccgctttaaccctttgggttgctttttaaccctttgggttgatctttaaccctttgggttacgctttaaccctttgggt

SEQ ID NO: 5553 - DNA, 135 bp, synthetic construct
  source 1..135: mol_type = other DNA
acccaaagggttaatgatctacccaaagggttaatacgctacccaaagggttaatgccgctacccaaagggttaatgctttacccaaagggttaatgatctacccaaagggttaatacgctacccaaagggttaa

SEQ ID NO: 5554 - DNA, 135 bp, synthetic construct
  source 1..135: mol_type = other DNA
ttaaccctttggtgtgatctttaaccctttggtgtacgctttaaccctttggtgtgccgctttaaccctttggtgtgctttttaaccctttggtgtgatctttaaccctttggtgtacgctttaaccctttggtg

SEQ ID NO: 5555 - DNA, 135 bp, synthetic construct
  source 1..135: mol_type = other DNA
caccaaagggttaatgatctcaccaaagggttaatacgctcaccaaagggttaatgccgctcaccaaagggttaatgctttcaccaaagggttaatgatctcaccaaagggttaatacgctcaccaaagggttaa

SEQ ID NO: 5556 - DNA, 135 bp, synthetic construct
  source 1..135: mol_type = other DNA
ttaaccctttggtttgatctttaaccctttggtttacgctttaaccctttggtttgccgctttaaccctttggtttgctttttaaccctttggtttgatctttaaccctttggtttacgctttaaccctttggtt

SEQ ID NO: 5557 - DNA, 135 bp, synthetic construct
  source 1..135: mol_type = other DNA
aaccaaagggttaatgatctaaccaaagggttaatacgctaaccaaagggttaatgccgctaaccaaagggttaatgctttaaccaaagggttaatgatctaaccaaagggttaatacgctaaccaaagggttaa

SEQ ID NO: 5558 - DNA, 140 bp, synthetic construct
  source 1..140: mol_type = other DNA
atgacgtcactgccgctatgacgtcactgctttatgacgtcactgatctatgacgtcactacgctatgacgtcactgccgctatgacgtcactgctttatgacgtcactgatctatgacgtcactacgctatgacgtcac

SEQ ID NO: 5559 - DNA, 140 bp, synthetic construct
  source 1..140: mol_type = other DNA
gtgacgtcattgccgctgtgacgtcattgctttgtgacgtcattgatctgtgacgtcattacgctgtgacgtcattgccgctgtgacgtcattgctttgtgacgtcattgatctgtgacgtcattacgctgtgacgtcat

SEQ ID NO: 5560 - DNA, 140 bp, synthetic construct
  source 1..140: mol_type = other DNA
atgacgtcattgccgctatgacgtcattgctttatgacgtcattgatctatgacgtcattacgctatgacgtcattgccgctatgacgtcattgctttatgacgtcattgatctatgacgtcattacgctatgacgtcat

SEQ ID NO: 5561 - DNA, 140 bp, synthetic construct; identical to SEQ ID NO: 5560
  source 1..140: mol_type = other DNA

SEQ ID NO: 5562 - DNA, 139 bp, synthetic construct
  source 1..139: mol_type = other DNA
aatggttctgcttgctttaatggttctgcttgatctaatggttctgcttacgctaatggttctgcttgccgctaatggttctgcttgctttaatggttctgcttgatctaatggttctgcttacgctaatggttctgct

SEQ ID NO: 5563 - DNA, 139 bp, synthetic construct
  source 1..139: mol_type = other DNA
agcagaaccatttgctttagcagaaccatttgatctagcagaaccatttacgctagcagaaccatttgccgctagcagaaccatttgctttagcagaaccatttgatctagcagaaccatttacgctagcagaaccatt

SEQ ID NO: 5564 - DNA, 139 bp, synthetic construct
  source 1..139: mol_type = other DNA
aattgttctgcttgctttaattgttctgcttgatctaattgttctgcttacgctaattgttctgcttgccgctaattgttctgcttgctttaattgttctgcttgatctaattgttctgcttacgctaattgttctgct

SEQ ID NO: 5565 - DNA, 139 bp, synthetic construct
  source 1..139: mol_type = other DNA
agcagaacaatttgctttagcagaacaatttgatctagcagaacaatttacgctagcagaacaatttgccgctagcagaacaatttgctttagcagaacaatttgatctagcagaacaatttacgctagcagaacaatt

SEQ ID NO: 5566 - DNA, 139 bp, synthetic construct
  source 1..139: mol_type = other DNA
agtggttctgcttgctttagtggttctgcttgatctagtggttctgcttacgctagtggttctgcttgccgctagtggttctgcttgctttagtggttctgcttgatctagtggttctgcttacgctagtggttctgct

SEQ ID NO: 5567 - DNA, 139 bp, synthetic construct
  source 1..139: mol_type = other DNA
agcagaaccacttgctttagcagaaccacttgatctagcagaaccacttacgctagcagaaccacttgccgctagcagaaccacttgctttagcagaaccacttgatctagcagaaccacttacgctagcagaaccact

SEQ ID NO: 5568 - DNA, 139 bp, synthetic construct
  source 1..139: mol_type = other DNA
agttgttctgcttgctttagttgttctgcttgatctagttgttctgcttacgctagttgttctgcttgccgctagttgttctgcttgctttagttgttctgcttgatctagttgttctgcttacgctagttgttctgct

SEQ ID NO: 5569 - DNA, 139 bp, synthetic construct
  source 1..139: mol_type = other DNA
agcagaacaacttgctttagcagaacaacttgatctagcagaacaacttacgctagcagaacaacttgccgctagcagaacaacttgctttagcagaacaacttgatctagcagaacaacttacgctagcagaacaact

SEQ ID NO: 5570 - DNA, 139 bp, synthetic construct
  source 1..139: mol_type = other DNA
tgacaggtgtcatgcttttgacaggtgtcatgatcttgacaggtgtcatacgcttgacaggtgtcatgccgcttgacaggtgtcatgcttttgacaggtgtcatgatcttgacaggtgtcatacgcttgacaggtgtca

SEQ ID NO: 5571 - DNA, 139 bp, synthetic construct
  source 1..139: mol_type = other DNA
tgacacctgtcatgcttttgacacctgtcatgatcttgacacctgtcatacgcttgacacctgtcatgccgcttgacacctgtcatgcttttgacacctgtcatgatcttgacacctgtcatacgcttgacacctgtca

SEQ ID NO: 5572 - DNA, 140 bp, synthetic construct; identical to SEQ ID NO: 5432
  source 1..140: mol_type = other DNA

SEQ ID NO: 5573 - DNA, 140 bp, synthetic construct; identical to SEQ ID NO: 5433
  source 1..140: mol_type = other DNA

SEQ ID NO: 5574 - DNA, 140 bp, synthetic construct; identical to SEQ ID NO: 5434
  source 1..140: mol_type = other DNA

SEQ ID NO: 5575 - DNA, 140 bp, synthetic construct; identical to SEQ ID NO: 5434
  source 1..140: mol_type = other DNA

SEQ ID NO: 5576 - DNA, 135 bp, synthetic construct
  source 1..135: mol_type = other DNA
ggttgccatggcaatgatctggttgccatggcaatacgctggttgccatggcaatgccgctggttgccatggcaatgctttggttgccatggcaatgatctggttgccatggcaatacgctggttgccatggcaa

SEQ ID NO: 5577 - DNA, 135 bp, synthetic construct
  source 1..135: mol_type = other DNA
ttgccatggcaacctgatctttgccatggcaacctacgctttgccatggcaacctgccgctttgccatggcaacctgctttttgccatggcaacctgatctttgccatggcaacctacgctttgccatggcaacc

SEQ ID NO: 5578 - DNA, 146 bp, synthetic construct; identical to SEQ ID NO: 5458
  source 1..146: mol_type = other DNA

SEQ ID NO: 5579 - DNA, 146 bp, synthetic construct; identical to SEQ ID NO: 5459
  source 1..146: mol_type = other DNA

SEQ ID NO: 5580 - DNA, 142 bp, synthetic construct
  source 1..142: mol_type = other DNA
accagtgtaataatttgatctaccagtgtaataatttacgctaccagtgtaataatttgccgctaccagtgtaataatttgctttaccagtgtaataatttgatctaccagtgtaataatttacgctaccagtgtaataatt

SEQ ID NO: 5581 - DNA, 142 bp, synthetic construct
  source 1..142: mol_type = other DNA
aattattacactggttgatctaattattacactggttacgctaattattacactggttgccgctaattattacactggttgctttaattattacactggttgatctaattattacactggttacgctaattattacactggt

SEQ ID NO: 5582 - DNA, 142 bp, synthetic construct
  source 1..142: mol_type = other DNA
accagtgtaatcatttgatctaccagtgtaatcatttacgctaccagtgtaatcatttgccgctaccagtgtaatcatttgctttaccagtgtaatcatttgatctaccagtgtaatcatttacgctaccagtgtaatcatt

SEQ ID NO: 5583 - DNA, 142 bp, synthetic construct
  source 1..142: mol_type = other DNA
aatgattacactggttgatctaatgattacactggttacgctaatgattacactggttgccgctaatgattacactggttgctttaatgattacactggttgatctaatgattacactggttacgctaatgattacactggt

SEQ ID NO: 5584 - DNA, 142 bp, synthetic construct
  source 1..142: mol_type = other DNA
accagtgtagtaatttgatctaccagtgtagtaatttacgctaccagtgtagtaatttgccgctaccagtgtagtaatttgctttaccagtgtagtaatttgatctaccagtgtagtaatttacgctaccagtgtagtaatt

SEQ ID NO: 5585 - DNA, 142 bp, synthetic construct
  source 1..142: mol_type = other DNA
aattactacactggttgatctaattactacactggttacgctaattactacactggttgccgctaattactacactggttgctttaattactacactggttgatctaattactacactggttacgctaattactacactggt

SEQ ID NO: 5586 - DNA, 142 bp, synthetic construct
  source 1..142: mol_type = other DNA
accagtgtagtcatttgatctaccagtgtagtcatttacgctaccagtgtagtcatttgccgctaccagtgtagtcatttgctttaccagtgtagtcatttgatctaccagtgtagtcatttacgctaccagtgtagtcatt

SEQ ID NO: 5587 - DNA, 142 bp, synthetic construct
  source 1..142: mol_type = other DNA
aatgactacactggttgatctaatgactacactggttacgctaatgactacactggttgccgctaatgactacactggttgctttaatgactacactggttgatctaatgactacactggttacgctaatgactacactggt

SEQ ID NO: 5588 - DNA, 142 bp, synthetic construct
  source 1..142: mol_type = other DNA
accagtgtgataatttgatctaccagtgtgataatttacgctaccagtgtgataatttgccgctaccagtgtgataatttgctttaccagtgtgataatttgatctaccagtgtgataatttacgctaccagtgtgataatt

SEQ ID NO: 5589 - DNA, 142 bp, synthetic construct
  source 1..142: mol_type = other DNA
aattatcacactggttgatctaattatcacactggttacgctaattatcacactggttgccgctaattatcacactggttgctttaattatcacactggttgatctaattatcacactggttacgctaattatcacactggt

SEQ ID NO: 5590 - DNA, 142 bp, synthetic construct
  source 1..142: mol_type = other DNA
accagtgtgatcatttgatctaccagtgtgatcatttacgctaccagtgtgatcatttgccgctaccagtgtgatcatttgctttaccagtgtgatcatttgatctaccagtgtgatcatttacgctaccagtgtgatcatt

SEQ ID NO: 5591 - DNA, 142 bp, synthetic construct
  source 1..142: mol_type = other DNA
aatgatcacactggttgatctaatgatcacactggttacgctaatgatcacactggttgccgctaatgatcacactggttgctttaatgatcacactggttgatctaatgatcacactggttacgctaatgatcacactggt

SEQ ID NO: 5592 - DNA, 142 bp, synthetic construct
  source 1..142: mol_type = other DNA
accagtgtggtaatttgatctaccagtgtggtaatttacgctaccagtgtggtaatttgccgctaccagtgtggtaatttgctttaccagtgtggtaatttgatctaccagtgtggtaatttacgctaccagtgtggtaatt

SEQ ID NO: 5593 - DNA, 142 bp, synthetic construct
  source 1..142: mol_type = other DNA
aattaccacactggttgatctaattaccacactggttacgctaattaccacactggttgccgctaattaccacactggttgctttaattaccacactggttgatctaattaccacactggttacgctaattaccacactggt

SEQ ID NO: 5594 - DNA, 142 bp, synthetic construct
  source 1..142: mol_type = other DNA
accagtgtggtcatttgatctaccagtgtggtcatttacgctaccagtgtggtcatttgccgctaccagtgtggtcatttgctttaccagtgtggtcatttgatctaccagtgtggtcatttacgctaccagtgtggtcatt

SEQ ID NO: 5595 - DNA, 142 bp, synthetic construct
  source 1..142: mol_type = other DNA
aatgaccacactggttgatctaatgaccacactggttacgctaatgaccacactggttgccgctaatgaccacactggttgctttaatgaccacactggttgatctaatgaccacactggttacgctaatgaccacactggt

SEQ ID NO: 5596 - DNA, 142 bp, synthetic construct
  source 1..142: mol_type = other DNA
accactgtaataatttgatctaccactgtaataatttacgctaccactgtaataatttgccgctaccactgtaataatttgctttaccactgtaataatttgatctaccactgtaataatttacgctaccactgtaataatt

SEQ ID NO: 5597 - DNA, 142 bp, synthetic construct
  source 1..142: mol_type = other DNA
aattattacagtggttgatctaattattacagtggttacgctaattattacagtggttgccgctaattattacagtggttgctttaattattacagtggttgatctaattattacagtggttacgctaattattacagtggt

SEQ ID NO: 5598 - DNA, 142 bp, synthetic construct
  source 1..142: mol_type = other DNA
accactgtaatcatttgatctaccactgtaatcatttacgctaccactgtaatcatttgccgctaccactgtaatcatttgctttaccactgtaatcatttgatctaccactgtaatcatttacgctaccactgtaatcatt

SEQ ID NO: 5599 - DNA, 142 bp, synthetic construct
  source 1..142: mol_type = other DNA
aatgattacagtggttgatctaatgattacagtggttacgctaatgattacagtggttgccgctaatgattacagtggttgctttaatgattacagtggttgatctaatgattacagtggttacgctaatgattacagtggt

SEQ ID NO: 5600 - DNA, 142 bp, synthetic construct
  source 1..142: mol_type = other DNA
accactgtagtaatttgatctaccactgtagtaatttacgctaccactgtagtaatttgccgctaccactgtagtaatttgctttaccactgtagtaatttgatctaccactgtagtaatttacgctaccactgtagtaatt

SEQ ID NO: 5601 - DNA, 142 bp, synthetic construct
  source 1..142: mol_type = other DNA
aattactacagtggttgatctaattactacagtggttacgctaattactacagtggttgccgctaattactacagtggttgctttaattactacagtggttgatctaattactacagtggttacgctaattactacagtggt

SEQ ID NO: 5602 - DNA, 142 bp, synthetic construct
  source 1..142: mol_type = other DNA
accactgtagtcatttgatctaccactgtagtcatttacgctaccactgtagtcatttgccgctaccactgtagtcatttgctttaccactgtagtcatttgatctaccactgtagtcatttacgctaccactgtagtcatt

SEQ ID NO: 5603 - DNA, 142 bp, synthetic construct
  source 1..142: mol_type = other DNA
aatgactacagtggttgatctaatgactacagtggttacgctaatgactacagtggttgccgctaatgactacagtggttgctttaatgactacagtggttgatctaatgactacagtggttacgctaatgactacagtggt

SEQ ID NO: 5604 - DNA, 142 bp, synthetic construct
  source 1..142: mol_type = other DNA
accactgtgataatttgatctaccactgtgataatttacgctaccactgtgataatttgccgctaccactgtgataatttgctttaccactgtgataatttgatctaccactgtgataatttacgctaccactgtgataatt

SEQ ID NO: 5605 - DNA, 142 bp, synthetic construct
  source 1..142: mol_type = other DNA
aattatcacagtggttgatctaattatcacagtggttacgctaattatcacagtggttgccgctaattatcacagtggttgctttaattatcacagtggttgatctaattatcacagtggttacgctaattatcacagtggt

SEQ ID NO: 5606 - DNA, 142 bp, synthetic construct
  source 1..142: mol_type = other DNA
accactgtgatcatttgatctaccactgtgatcatttacgctaccactgtgatcatttgccgctaccactgtgatcatttgctttaccactgtgatcatttgatctaccactgtgatcatttacgctaccactgtgatcatt

SEQ ID NO: 5607 - DNA, 142 bp, synthetic construct
  source 1..142: mol_type = other DNA
aatgatcacagtggttgatctaatgatcacagtggttacgctaatgatcacagtggttgccgctaatgatcacagtggttgctttaatgatcacagtggttgatctaatgatcacagtggttacgctaatgatcacagtggt

SEQ ID NO: 5608 - DNA, 142 bp, synthetic construct
  source 1..142: mol_type = other DNA
accactgtggtaatttgatctaccactgtggtaatttacgctaccactgtggtaatttgccgctaccactgtggtaatttgctttaccactgtggtaatttgatctaccactgtggtaatttacgctaccactgtggtaatt

SEQ ID NO: 5609 - DNA, 142 bp, synthetic construct
  source 1..142: mol_type = other DNA
aattaccacagtggttgatctaattaccacagtggttacgctaattaccacagtggttgccgctaattaccacagtggttgctttaattaccacagtggttgatctaattaccacagtggttacgctaattaccacagtggt

SEQ ID NO: 5610 - DNA, 142 bp, synthetic construct
  source 1..142: mol_type = other DNA
accactgtggtcatttgatctaccactgtggtcatttacgctaccactgtggtcatttgccgctaccactgtggtcatttgctttaccactgtggtcatttgatctaccactgtggtcatttacgctaccactgtggtcatt

SEQ ID NO: 5611 - DNA, 142 bp, synthetic construct
  source 1..142: mol_type = other DNA
aatgaccacagtggttgatctaatgaccacagtggttacgctaatgaccacagtggttgccgctaatgaccacagtggttgctttaatgaccacagtggttgatctaatgaccacagtggttacgctaatgaccacagtggt

SEQ ID NO: 5612 - DNA, 142 bp, synthetic construct
  source 1..142: mol_type = other DNA
actagtgtaataatttgatctactagtgtaataatttacgctactagtgtaataatttgccgctactagtgtaataatttgctttactagtgtaataatttgatctactagtgtaataatttacgctactagtgtaataatt

SEQ ID NO: 5613 - DNA, 142 bp, synthetic construct
  source 1..142: mol_type = other DNA
aattattacactagttgatctaattattacactagttacgctaattattacactagttgccgctaattattacactagttgctttaattattacactagttgatctaattattacactagttacgctaattattacactagt

SEQ ID NO: 5614 - DNA, 142 bp, synthetic construct
  source 1..142: mol_type = other DNA
actagtgtaatcatttgatctactagtgtaatcatttacgctactagtgtaatcatttgccgctactagtgtaatcatttgctttactagtgtaatcatttgatctactagtgtaatcatttacgctactagtgtaatcatt

SEQ ID NO: 5615 - DNA, 142 bp, synthetic construct
  source 1..142: mol_type = other DNA
aatgattacactagttgatctaatgattacactagttacgctaatgattacactagttgccgctaatgattacactagttgctttaatgattacactagttgatctaatgattacactagttacgctaatgattacactagt

SEQ ID NO: 5616 - DNA, 142 bp, synthetic construct
  source 1..142: mol_type = other DNA
actagtgtagtaatttgatctactagtgtagtaatttacgctactagtgtagtaatttgccgctactagtgtagtaatttgctttactagtgtagtaatttgatctactagtgtagtaatttacgctactagtgtagtaatt

SEQ ID NO: 5617 - DNA, 142 bp, synthetic construct
  source 1..142: mol_type = other DNA
aattactacactagttgatctaattactacactagttacgctaattactacactagttgccgctaattactacactagttgctttaattactacactagttgatctaattactacactagttacgctaattactacactagt

SEQ ID NO: 5618 - DNA, 142 bp, synthetic construct
  source 1..142: mol_type = other DNA
actagtgtagtcatttgatctactagtgtagtcatttacgctactagtgtagtcatttgccgctactagtgtagtcatttgctttactagtgtagtcatttgatctactagtgtagtcatttacgctactagtgtagtcatt

SEQ ID NO: 5619 - DNA, 142 bp, synthetic construct
  source 1..142: mol_type = other DNA
aatgactacactagttgatctaatgactacactagttacgctaatgactacactagttgccgctaatgactacactagttgctttaatgactacactagttgatctaatgactacactagttacgctaatgactacactagt

SEQ ID NO: 5620 - DNA, 142 bp, synthetic construct
  source 1..142: mol_type = other DNA
actagtgtgataatttgatctactagtgtgataatttacgctactagtgtgataatttgccgctactagtgtgataatttgctttactagtgtgataatttgatctactagtgtgataatttacgctactagtgtgataatt

SEQ ID NO: 5621 - DNA, 142 bp, synthetic construct
  source 1..142: mol_type = other DNA
aattatcacactagttgatctaattatcacactagttacgctaattatcacactagttgccgctaattatcacactagttgctttaattatcacactagttgatctaattatcacactagttacgctaattatcacactagt

SEQ ID NO: 5622 - DNA, 142 bp, synthetic construct
  source 1..142: mol_type = other DNA
actagtgtgatcatttgatctactagtgtgatcatttacgctactagtgtgatcatttgccgctactagtgtgatcatttgctttactagtgtgatcatttgatctactagtgtgatcatttacgctactagtgtgatcatt

SEQ ID NO: 5623 - DNA, 142 bp, synthetic construct
  source 1..142: mol_type = other DNA
aatgatcacactagttgatctaatgatcacactagttacgctaatgatcacactagttgccgctaatgatcacactagttgctttaatgatcacactagttgatctaatgatcacactagttacgctaatgatcacactagt

SEQ ID NO: 5624 - DNA, 142 bp, synthetic construct
  source 1..142: mol_type = other DNA
actagtgtggtaatttgatctactagtgtggtaatttacgctactagtgtggtaatttgccgctactagtgtggtaatttgctttactagtgtggtaatttgatctactagtgtggtaatttacgctactagtgtggtaatt

SEQ ID NO: 5625 - DNA, 142 bp, synthetic construct
  source 1..142: mol_type = other DNA
aattaccacactagttgatctaattaccacactagttacgctaattaccacactagttgccgctaattaccacactagttgctttaattaccacactagttgatctaattaccacactagttacgctaattaccacactagt

SEQ ID NO: 5626 - DNA, 142 bp, synthetic construct
  source 1..142: mol_type = other DNA
actagtgtggtcatttgatctactagtgtggtcatttacgctactagtgtggtcatttgccgctactagtgtggtcatttgctttactagtgtggtcatttgatctactagtgtggtcatttacgctactagtgtggtcatt

SEQ ID NO: 5627 - DNA, 142 bp, synthetic construct
  source 1..142: mol_type = other DNA
aatgaccacactagttgatctaatgaccacactagttacgctaatgaccacactagttgccgctaatgaccacactagttgctttaatgaccacactagttgatctaatgaccacactagttacgctaatgaccacactagt

SEQ ID NO: 5628 - DNA, 142 bp, synthetic construct
  source 1..142: mol_type = other DNA
actactgtaataatttgatctactactgtaataatttacgctactactgtaataatttgccgctactactgtaataatttgctttactactgtaataatttgatctactactgtaataatttacgctactactgtaataatt

SEQ ID NO: 5629 - DNA, 142 bp, synthetic construct
  source 1..142: mol_type = other DNA
aattattacagtagttgatctaattattacagtagttacgctaattattacagtagttgccgctaattattacagtagttgctttaattattacagtagttgatctaattattacagtagttacgctaattattacagtagt

SEQ ID NO: 5630 - DNA, 142 bp, synthetic construct
  source 1..142: mol_type = other DNA
actactgtaatcatttgatctactactgtaatcatttacgctactactgtaatcatttgccgctactactgtaatcatttgctttactactgtaatcatttgatctactactgtaatcatttacgctactactgtaatcatt

SEQ ID NO: 5631 - DNA, 142 bp, synthetic construct
  source 1..142: mol_type = other DNA
aatgattacagtagttgatctaatgattacagtagttacgctaatgattacagtagttgccgctaatgattacagtagttgctttaatgattacagtagttgatctaatgattacagtagttacgctaatgattacagtagt

SEQ ID NO: 5632 - DNA, 142 bp, synthetic construct
  source 1..142: mol_type = other DNA
actactgtagtaatttgatctactactgtagtaatttacgctactactgtagtaatttgccgctactactgtagtaatttgctttactactgtagtaatttgatctactactgtagtaatttacgctactactgtagtaatt

SEQ ID NO: 5633 - DNA, 142 bp, synthetic construct
  source 1..142: mol_type = other DNA
aattactacagtagttgatctaattactacagtagttacgctaattactacagtagttgccgctaattactacagtagttgctttaattactacagtagttgatctaattactacagtagttacgctaattactacagtagt

SEQ ID NO: 5634 - DNA, 142 bp, synthetic construct
  source 1..142: mol_type = other DNA
actactgtagtcatttgatctactactgtagtcatttacgctactactgtagtcatttgccgctactactgtagtcatttgctttactactgtagtcatttgatctactactgtagtcatttacgctactactgtagtcatt

SEQ ID NO: 5635 - DNA, 142 bp, synthetic construct
  source 1..142: mol_type = other DNA
aatgactacagtagttgatctaatgactacagtagttacgctaatgactacagtagttgccgctaatgactacagtagttgctttaatgactacagtagttgatctaatgactacagtagttacgctaatgactacagtagt

SEQ ID NO: 5636 - DNA, 142 bp, synthetic construct
  source 1..142: mol_type = other DNA
actactgtgataatttgatctactactgtgataatttacgctactactgtgataatttgccgctactactgtgataatttgctttactactgtgataatttgatctactactgtgataatttacgctactactgtgataatt

SEQ ID NO: 5637 - DNA, 142 bp, synthetic construct
  source 1..142: mol_type = other DNA
aattatcacagtagttgatctaattatcacagtagttacgctaattatcacagtagttgccgctaattatcacagtagttgctttaattatcacagtagttgatctaattatcacagtagttacgctaattatcacagtagt

SEQ ID NO: 5638 - DNA, 142 bp, synthetic construct
  source 1..142: mol_type = other DNA
actactgtgatcatttgatctactactgtgatcatttacgctactactgtgatcatttgccgctactactgtgatcatttgctttactactgtgatcatttgatctactactgtgatcatttacgctactactgtgatcatt

SEQ ID NO: 5639 - DNA, 142 bp, synthetic construct
  source 1..142: mol_type = other DNA
aatgatcacagtagttgatctaatgatcacagtagttacgctaatgatcacagtagttgccgctaatgatcacagtagttgctttaatgatcacagtagttgatctaatgatcacagtagttacgctaatgatcacagtagt

SEQ ID NO: 5640 - DNA, 142 bp, synthetic construct
  source 1..142: mol_type = other DNA
actactgtggtaatttgatctactactgtggtaatttacgctactactgtggtaatttgccgctactactgtggtaatttgctttactactgtggtaatttgatctactactgtggtaatttacgctactactgtggtaatt

SEQ ID NO: 5641 - DNA, 142 bp, synthetic construct
  source 1..142: mol_type = other DNA
aattaccacagtagttgatctaattaccacagtagttacgctaattaccacagtagttgccgctaattaccacagtagttgctttaattaccacagtagttgatctaattaccacagtagttacgctaattaccacagtagt

SEQ ID NO: 5642 - DNA, 142 bp, synthetic construct
  source 1..142: mol_type = other DNA
actactgtggtcatttgatctactactgtggtcatttacgctactactgtggtcatttgccgctactactgtggtcatttgctttactactgtggtcatttgatctactactgtggtcatttacgctactactgtggtcatt

SEQ ID NO: 5643 - DNA, 142 bp, synthetic construct
  source 1..142: mol_type = other DNA
aatgaccacagtagttgatctaatgaccacagtagttacgctaatgaccacagtagttgccgctaatgaccacagtagttgctttaatgaccacagtagttgatctaatgaccacagtagttacgctaatgaccacagtagt

SEQ ID NO: 5644 - DNA, 139 bp, synthetic construct; identical to SEQ ID NO: 5570
  source 1..139: mol_type = other DNA

SEQ ID NO: 5645 - DNA, 139 bp, synthetic construct; identical to SEQ ID NO: 5571
  source 1..139: mol_type = other DNA

SEQ ID NO: 5646 - DNA, 139 bp, synthetic construct
  source 1..139: mol_type = other DNA
tgacagctgtcatgcttttgacagctgtcatgatcttgacagctgtcatacgcttgacagctgtcatgccgcttgacagctgtcatgcttttgacagctgtcatgatcttgacagctgtcatacgcttgacagctgtca

SEQ ID NO: 5647 - DNA, 139 bp, synthetic construct; identical to SEQ ID NO: 5646
  source 1..139: mol_type = other DNA

SEQ ID NO: 5648 - DNA, 140 bp, synthetic construct
  source 1..140: mol_type = other DNA
tgattgacagtgccgcttgattgacagtgcttttgattgacagtgatcttgattgacagtacgcttgattgacagtgccgcttgattgacagtgcttttgattgacagtgatcttgattgacagtacgcttgattgacag

SEQ ID NO: 5649 - DNA, 140 bp, synthetic construct
  source 1..140: mol_type = other DNA
ctgtcaatcatgccgctctgtcaatcatgctttctgtcaatcatgatctctgtcaatcatacgctctgtcaatcatgccgctctgtcaatcatgctttctgtcaatcatgatctctgtcaatcatacgctctgtcaatca

SEQ ID NO: 5650 - DNA, 140 bp, synthetic construct
  source 1..140: mol_type = other DNA
gatgacgtcatgccgctgatgacgtcatgctttgatgacgtcatgatctgatgacgtcatacgctgatgacgtcatgccgctgatgacgtcatgctttgatgacgtcatgatctgatgacgtcatacgctgatgacgtca

SEQ ID NO: 5651 - DNA, 140 bp, synthetic construct
  source 1..140: mol_type = other DNA
tgacgtcatctgccgcttgacgtcatctgcttttgacgtcatctgatcttgacgtcatctacgcttgacgtcatctgccgcttgacgtcatctgcttttgacgtcatctgatcttgacgtcatctacgcttgacgtcatc

SEQ ID NO: 5652 - DNA, 136 bp, synthetic construct
  source 1..136: mol_type = other DNA
ccacgtggtacgctccacgtggtgccgctccacgtggtgctttccacgtggtgatctccacgtggtacgctccacgtggtgccgctccacgtggtgctttccacgtggtgatctccacgtggtacgctccacgtgg

SEQ ID NO: 5653 - DNA, 136 bp, synthetic construct; identical to SEQ ID NO: 5652
  source 1..136: mol_type = other DNA

SEQ ID NO: 5654 - DNA, 149 bp, synthetic construct
  source 1..149: mol_type = other DNA
aacaatatgcagtgtttgatctaacaatatgcagtgtttacgctaacaatatgcagtgtttgccgctaacaatatgcagtgtttgctttaacaatatgcagtgtttgatctaacaatatgcagtgtttacgctaacaatatgcagtgtt

SEQ ID NO: 5655 - DNA, 149 bp, synthetic construct
  source 1..149: mol_type = other DNA
aacactgcatattgtttgatctaacactgcatattgtttacgctaacactgcatattgtttgccgctaacactgcatattgtttgctttaacactgcatattgtttgatctaacactgcatattgtttacgctaacactgcatattgtt

SEQ ID NO: 5656 - DNA, 149 bp, synthetic construct
  source 1..149: mol_type = other DNA
aacaatatgcattgtttgatctaacaatatgcattgtttacgctaacaatatgcattgtttgccgctaacaatatgcattgtttgctttaacaatatgcattgtttgatctaacaatatgcattgtttacgctaacaatatgcattgtt

SEQ ID NO: 5657 - DNA, 149 bp, synthetic construct
  source 1..149: mol_type = other DNA
aacaatgcatattgtttgatctaacaatgcatattgtttacgctaacaatgcatattgtttgccgctaacaatgcatattgtttgctttaacaatgcatattgtttgatctaacaatgcatattgtttacgctaacaatgcatattgtt

SEQ ID NO: 5658 - DNA, 149 bp, synthetic construct
  source 1..149: mol_type = other DNA
aacaatgtgcagtgtttgatctaacaatgtgcagtgtttacgctaacaatgtgcagtgtttgccgctaacaatgtgcagtgtttgctttaacaatgtgcagtgtttgatctaacaatgtgcagtgtttacgctaacaatgtgcagtgtt

SEQ ID NO: 5659 - DNA, 149 bp, synthetic construct
  source 1..149: mol_type = other DNA
aacactgcacattgtttgatctaacactgcacattgtttacgctaacactgcacattgtttgccgctaacactgcacattgtttgctttaacactgcacattgtttgatctaacactgcacattgtttacgctaacactgcacattgtt

SEQ ID NO: 5660 - DNA, 149 bp, synthetic construct
  source 1..149: mol_type = other DNA
aacaatgtgcattgtttgatctaacaatgtgcattgtttacgctaacaatgtgcattgtttgccgctaacaatgtgcattgtttgctttaacaatgtgcattgtttgatctaacaatgtgcattgtttacgctaacaatgtgcattgtt

SEQ ID NO: 5661 - DNA, 149 bp, synthetic construct
  source 1..149: mol_type = other DNA
aacaatgcacattgtttgatctaacaatgcacattgtttacgctaacaatgcacattgtttgccgctaacaatgcacattgtttgctttaacaatgcacattgtttgatctaacaatgcacattgtttacgctaacaatgcacattgtt

SEQ ID NO: 5662 - DNA, 142 bp, synthetic construct
  source 1..142: mol_type = other DNA
gcactaccatagtgatgatctgcactaccatagtgatacgctgcactaccatagtgatgccgctgcactaccatagtgatgctttgcactaccatagtgatgatctgcactaccatagtgatacgctgcactaccatagtga

SEQ ID NO: 5663 - DNA, 142 bp, synthetic construct
  source 1..142: mol_type = other DNA
tcactatggtagtgctgatcttcactatggtagtgctacgcttcactatggtagtgctgccgcttcactatggtagtgctgcttttcactatggtagtgctgatcttcactatggtagtgctacgcttcactatggtagtgc

SEQ ID NO: 5664 - DNA, 142 bp, synthetic construct
  source 1..142: mol_type = other DNA
gcactaccatagtgctgatctgcactaccatagtgctacgctgcactaccatagtgctgccgctgcactaccatagtgctgctttgcactaccatagtgctgatctgcactaccatagtgctacgctgcactaccatagtgc

SEQ ID NO: 5665 - DNA, 142 bp, synthetic construct
  source 1..142: mol_type = other DNA
gcactatggtagtgctgatctgcactatggtagtgctacgctgcactatggtagtgctgccgctgcactatggtagtgctgctttgcactatggtagtgctgatctgcactatggtagtgctacgctgcactatggtagtgc

SEQ ID NO: 5666 - DNA, 142 bp, synthetic construct
  source 1..142: mol_type = other DNA
gcactaccgtagtgatgatctgcactaccgtagtgatacgctgcactaccgtagtgatgccgctgcactaccgtagtgatgctttgcactaccgtagtgatgatctgcactaccgtagtgatacgctgcactaccgtagtga

SEQ ID NO: 5667 - DNA, 142 bp, synthetic construct
  source 1..142: mol_type = other DNA
tcactacggtagtgctgatcttcactacggtagtgctacgcttcactacggtagtgctgccgcttcactacggtagtgctgcttttcactacggtagtgctgatcttcactacggtagtgctacgcttcactacggtagtgc

SEQ ID NO: 5668 - DNA, 142 bp, synthetic construct
  source 1..142: mol_type = other DNA
gcactaccgtagtgctgatctgcactaccgtagtgctacgctgcactaccgtagtgctgccgctgcactaccgtagtgctgctttgcactaccgtagtgctgatctgcactaccgtagtgctacgctgcactaccgtagtgc

SEQ ID NO: 5669 - DNA, 142 bp, synthetic construct
  source 1..142: mol_type = other DNA
gcactacggtagtgctgatctgcactacggtagtgctacgctgcactacggtagtgctgccgctgcactacggtagtgctgctttgcactacggtagtgctgatctgcactacggtagtgctacgctgcactacggtagtgc

SEQ ID NO: 5670 - DNA, 142 bp, synthetic construct
  source 1..142: mol_type = other DNA
gcactatcatagtgatgatctgcactatcatagtgatacgctgcactatcatagtgatgccgctgcactatcatagtgatgctttgcactatcatagtgatgatctgcactatcatagtgatacgctgcactatcatagtga

SEQ ID NO: 5671 - DNA, 142 bp, synthetic construct
  source 1..142: mol_type = other DNA
tcactatgatagtgctgatcttcactatgatagtgctacgcttcactatgatagtgctgccgcttcactatgatagtgctgcttttcactatgatagtgctgatcttcactatgatagtgctacgcttcactatgatagtgc

SEQ ID NO: 5672 - DNA, 142 bp, synthetic construct
  source 1..142: mol_type = other DNA
gcactatcatagtgctgatctgcactatcatagtgctacgctgcactatcatagtgctgccgctgcactatcatagtgctgctttgcactatcatagtgctgatctgcactatcatagtgctacgctgcactatcatagtgc

SEQ ID NO: 5673 - DNA, 142 bp, synthetic construct
  source 1..142: mol_type = other DNA
gcactatgatagtgctgatctgcactatgatagtgctacgctgcactatgatagtgctgccgctgcactatgatagtgctgctttgcactatgatagtgctgatctgcactatgatagtgctacgctgcactatgatagtgc

SEQ ID NO: 5674 - DNA, 142 bp, synthetic construct
  source 1..142: mol_type = other DNA
gcactatcgtagtgatgatctgcactatcgtagtgatacgctgcactatcgtagtgatgccgctgcactatcgtagtgatgctttgcactatcgtagtgatgatctgcactatcgtagtgatacgctgcactatcgtagtga

SEQ ID NO: 5675 - DNA, 142 bp, synthetic construct
  source 1..142: mol_type = other DNA
tcactacgatagtgctgatcttcactacgatagtgctacgcttcactacgatagtgctgccgcttcactacgatagtgctgcttttcactacgatagtgctgatcttcactacgatagtgctacgcttcactacgatagtgc

SEQ ID NO: 5676 - DNA, 142 bp, synthetic construct
  source 1..142: mol_type = other DNA
gcactatcgtagtgctgatctgcactatcgtagtgctacgctgcactatcgtagtgctgccgctgcactatcgtagtgctgctttgcactatcgtagtgctgatctgcactatcgtagtgctacgctgcactatcgtagtgc

SEQ ID NO: 5677 - DNA, 142 bp, synthetic construct
  source 1..142: mol_type = other DNA
gcactacgatagtgctgatctgcactacgatagtgctacgctgcactacgatagtgctgccgctgcactacgatagtgctgctttgcactacgatagtgctgatctgcactacgatagtgctacgctgcactacgatagtgc

SEQ ID NO: 5678 - DNA, 142 bp, synthetic construct
  source 1..142: mol_type = other DNA
tcactaccatagtgatgatcttcactaccatagtgatacgcttcactaccatagtgatgccgcttcactaccatagtgatgcttttcactaccatagtgatgatcttcactaccatagtgatacgcttcactaccatagtga

SEQ ID NO: 5679 - DNA, 142 bp, synthetic construct
  source 1..142: mol_type = other DNA
tcactatggtagtgatgatcttcactatggtagtgatacgcttcactatggtagtgatgccgcttcactatggtagtgatgcttttcactatggtagtgatgatcttcactatggtagtgatacgcttcactatggtagtga

SEQ ID NO: 5680 - DNA, 142 bp, synthetic construct
  source 1..142: mol_type = other DNA
tcactaccatagtgctgatcttcactaccatagtgctacgcttcactaccatagtgctgccgcttcactaccatagtgctgcttttcactaccatagtgctgatcttcactaccatagtgctacgcttcactaccatagtgc

SEQ ID NO: 5681 - DNA, 142 bp, synthetic construct
  source 1..142: mol_type = other DNA
gcactatggtagtgatgatctgcactatggtagtgatacgctgcactatggtagtgatgccgctgcactatggtagtgatgctttgcactatggtagtgatgatctgcactatggtagtgatacgctgcactatggtagtga

SEQ ID NO: 5682 - DNA, 142 bp, synthetic construct
  source 1..142: mol_type = other DNA
tcactaccgtagtgatgatcttcactaccgtagtgatacgcttcactaccgtagtgatgccgcttcactaccgtagtgatgcttttcactaccgtagtgatgatcttcactaccgtagtgatacgcttcactaccgtagtga

SEQ ID NO: 5683 - DNA, 142 bp, synthetic construct
  source 1..142: mol_type = other DNA
tcactacggtagtgatgatcttcactacggtagtgatacgcttcactacggtagtgatgccgcttcactacggtagtgatgcttttcactacggtagtgatgatcttcactacggtagtgatacgcttcactacggtagtga

SEQ ID NO: 5684 - DNA, 142 bp, synthetic construct
  source 1..142: mol_type = other DNA
tcactaccgtagtgctgatcttcactaccgtagtgctacgcttcactaccgtagtgctgccgcttcactaccgtagtgctgcttttcactaccgtagtgctgatcttcactaccgtagtgctacgcttcactaccgtagtgc

SEQ ID NO: 5685 - DNA, 142 bp, synthetic construct
  source 1..142: mol_type = other DNA
gcactacggtagtgatgatctgcactacggtagtgatacgctgcactacggtagtgatgccgctgcactacggtagtgatgctttgcactacggtagtgatgatctgcactacggtagtgatacgctgcactacggtagtga

SEQ ID NO: 5686 - DNA, 142 bp, synthetic construct
  source 1..142: mol_type = other DNA
tcactatcatagtgatgatcttcactatcatagtgatacgcttcactatcatagtgatgccgcttcactatcatagtgatgcttttcactatcatagtgatgatcttcactatcatagtgatacgcttcactatcatagtga

SEQ ID NO: 5687 - DNA, 142 bp, synthetic construct
  source 1..142: mol_type = other DNA
tcactatgatagtgatgatcttcactatgatagtgatacgcttcactatgatagtgatgccgcttcactatgatagtgatgcttttcactatgatagtgatgatcttcactatgatagtgatacgcttcactatgatagtga

SEQ ID NO: 5688 - DNA, 142 bp, synthetic construct
  source 1..142: mol_type = other DNA
tcactatcatagtgctgatcttcactatcatagtgctacgcttcactatcatagtgctgccgcttcactatcatagtgctgcttttcactatcatagtgctgatcttcactatcatagtgctacgcttcactatcatagtgc

SEQ ID NO: 5689 - DNA, 142 bp, synthetic construct
  source 1..142: mol_type = other DNA
gcactatgatagtgatgatctgcactatgatagtgatacgctgcactatgatagtgatgccgctgcactatgatagtgatgctttgcactatgatagtgatgatctgcactatgatagtgatacgctgcactatgatagtga

SEQ ID NO: 5690 - DNA, 142 bp, synthetic construct
  source 1..142: mol_type = other DNA
tcactatcgtagtgatgatcttcactatcgtagtgatacgcttcactatcgtagtgatgccgcttcactatcgtagtgatgcttttcactatcgtagtgatgatcttcactatcgtagtgatacgcttcactatcgtagtga

SEQ ID NO: 5691 - DNA, 142 bp, synthetic construct
  source 1..142: mol_type = other DNA
tcactacgatagtgatgatcttcactacgatagtgatacgcttcactacgatagtgatgccgcttcactacgatagtgatgcttttcactacgatagtgatgatcttcactacgatagtgatacgcttcactacgatagtga

SEQ ID NO: 5692 - DNA, 142 bp, synthetic construct
  source 1..142: mol_type = other DNA
tcactatcgtagtgctgatcttcactatcgtagtgctacgcttcactatcgtagtgctgccgcttcactatcgtagtgctgcttttcactatcgtagtgctgatcttcactatcgtagtgctacgcttcactatcgtagtgc

SEQ ID NO: 5693 - DNA, 142 bp, synthetic construct
  source 1..142: mol_type = other DNA
gcactacgatagtgatgatctgcactacgatagtgatacgctgcactacgatagtgatgccgctgcactacgatagtgatgctttgcactacgatagtgatgatctgcactacgatagtgatacgctgcactacgatagtga

SEQ ID NO: 5694 - DNA, 140 bp, synthetic construct
  source 1..140: mol_type = other DNA
tgactcagcatgccgcttgactcagcatgcttttgactcagcatgatcttgactcagcatacgcttgactcagcatgccgcttgactcagcatgcttttgactcagcatgatcttgactcagcatacgcttgactcagca

SEQ ID NO: 5695 - DNA, 140 bp, synthetic construct
  source 1..140: mol_type = other DNA
tgctgagtcatgccgcttgctgagtcatgcttttgctgagtcatgatcttgctgagtcatacgcttgctgagtcatgccgcttgctgagtcatgcttttgctgagtcatgatcttgctgagtcatacgcttgctgagtca

SEQ ID NO: 5696 - DNA, 149 bp, synthetic construct
  source 1..149: mol_type = other DNA
ggggaatcccctgccgctggggaatcccctgctttggggaatcccctgatctggggaatcccctacgctggggaatcccctgccgctggggaatcccctgctttggggaatcccctgatctggggaatcccctacgctggggaatcccc

SEQ ID NO: 5697 - DNA, 149 bp, synthetic construct
  source 1..149: mol_type = other DNA
ggggattcccctgccgctggggattcccctgctttggggattcccctgatctggggattcccctacgctggggattcccctgccgctggggattcccctgctttggggattcccctgatctggggattcccctacgctggggattcccc

SEQ ID NO: 5698 - DNA, 149 bp, synthetic construct; identical to SEQ ID NO: 5697
  source 1..149: mol_type = other DNA

SEQ ID NO: 5699 - DNA, 149 bp, synthetic construct; identical to SEQ ID NO: 5696
  source 1..149: mol_type = other DNA

SEQ ID NO: 5700 - DNA, 146 bp, synthetic construct
  source 1..146: mol_type = other DNA
cagctgctgtacgctcagctgctgtgccgctcagctgctgtgctttcagctgctgtgatctcagctgctgtacgctcagctgctgtgccgctcagctgctgtgctttcagctgctgtgatctcagctgctgtacgctcagctgctg

SEQ ID NO: 5701 - DNA, 146 bp, synthetic construct
  source 1..146: mol_type = other DNA
cagcagctgtacgctcagcagctgtgccgctcagcagctgtgctttcagcagctgtgatctcagcagctgtacgctcagcagctgtgccgctcagcagctgtgctttcagcagctgtgatctcagcagctgtacgctcagcagctg

SEQ ID NO: 5702 - DNA, 140 bp, synthetic construct; identical to SEQ ID NO: 5695
  source 1..140: mol_type = other DNA

SEQ ID NO: 5703 - DNA, 140 bp, synthetic construct; identical to SEQ ID NO: 5694
  source 1..140: mol_type = other DNA

SEQ ID NO: 5704 - DNA, 139 bp, synthetic construct; identical to SEQ ID NO: 5646
  source 1..139: mol_type = other DNA

SEQ ID NO: 5705 - DNA, 139 bp, synthetic construct; identical to SEQ ID NO: 5646
  source 1..139: mol_type = other DNA

SEQ ID NO: 5706 - DNA, 149 bp, synthetic construct
  source 1..149: mol_type = other DNA
taacccaatcatgccgcttaacccaatcatgcttttaacccaatcatgatcttaacccaatcatacgcttaacccaatcatgccgcttaacccaatcatgcttttaacccaatcatgatcttaacccaatcatacgcttaacccaatca

SEQ ID NO: 5707 - DNA, 149 bp, synthetic construct
  source 1..149: mol_type = other DNA
tgattgggttatgccgcttgattgggttatgcttttgattgggttatgatcttgattgggttatacgcttgattgggttatgccgcttgattgggttatgcttttgattgggttatgatcttgattgggttatacgcttgattgggtta

SEQ ID NO: 5708 - DNA, 149 bp, synthetic construct
  source 1..149: mol_type = other DNA
taacctaatcatgccgcttaacctaatcatgcttttaacctaatcatgatcttaacctaatcatacgcttaacctaatcatgccgcttaacctaatcatgcttttaacctaatcatgatcttaacctaatcatacgcttaacctaatca

SEQ ID NO: 5709 - DNA, 149 bp, synthetic construct
  source 1..149: mol_type = other DNA
tgattaggttatgccgcttgattaggttatgcttttgattaggttatgatcttgattaggttatacgcttgattaggttatgccgcttgattaggttatgcttttgattaggttatgatcttgattaggttatacgcttgattaggtta

SEQ ID NO: 5710 - DNA, 149 bp, synthetic construct
  source 1..149: mol_type = other DNA
taactcaatcatgccgcttaactcaatcatgcttttaactcaatcatgatcttaactcaatcatacgcttaactcaatcatgccgcttaactcaatcatgcttttaactcaatcatgatcttaactcaatcatacgcttaactcaatca

SEQ ID NO: 5711 - DNA, 149 bp, synthetic construct
  source 1..149: mol_type = other DNA
tgattgagttatgccgcttgattgagttatgcttttgattgagttatgatcttgattgagttatacgcttgattgagttatgccgcttgattgagttatgcttttgattgagttatgatcttgattgagttatacgcttgattgagtta

SEQ ID NO: 5712 - DNA, 149 bp, synthetic construct
  source 1..149: mol_type = other DNA
taacttaatcatgccgcttaacttaatcatgcttttaacttaatcatgatcttaacttaatcatacgcttaacttaatcatgccgcttaacttaatcatgcttttaacttaatcatgatcttaacttaatcatacgcttaacttaatca

SEQ ID NO: 5713 - DNA, 149 bp, synthetic construct
  source 1..149: mol_type = other DNA
tgattaagttatgccgcttgattaagttatgcttttgattaagttatgatcttgattaagttatacgcttgattaagttatgccgcttgattaagttatgcttttgattaagttatgatcttgattaagttatacgcttgattaagtta

SEQ ID NO: 5714 - DNA, 149 bp, synthetic construct
  source 1..149: mol_type = other DNA
taatccaatcatgccgcttaatccaatcatgcttttaatccaatcatgatcttaatccaatcatacgcttaatccaatcatgccgcttaatccaatcatgcttttaatccaatcatgatcttaatccaatcatacgcttaatccaatca

SEQ ID NO: 5715 - DNA, 149 bp, synthetic construct
  source 1..149: mol_type = other DNA
tgattggattatgccgcttgattggattatgcttttgattggattatgatcttgattggattatacgcttgattggattatgccgcttgattggattatgcttttgattggattatgatcttgattggattatacgcttgattggatta

SEQ ID NO: 5716 - DNA, 149 bp, synthetic construct
  source 1..149: mol_type = other DNA
taatctaatcatgccgcttaatctaatcatgcttttaatctaatcatgatcttaatctaatcatacgcttaatctaatcatgccgcttaatctaatcatgcttttaatctaatcatgatcttaatctaatcatacgcttaatctaatca

SEQ ID NO: 5717 - DNA, 149 bp, synthetic construct
  source 1..149: mol_type = other DNA
tgattagattatgccgcttgattagattatgcttttgattagattatgatcttgattagattatacgcttgattagattatgccgcttgattagattatgcttttgattagattatgatcttgattagattatacgcttgattagatta

SEQ ID NO: 5718 - DNA, 149 bp, synthetic construct
  source 1..149: mol_type = other DNA
taattcaatcatgccgcttaattcaatcatgcttttaattcaatcatgatcttaattcaatcatacgcttaattcaatcatgccgcttaattcaatcatgcttttaattcaatcatgatcttaattcaatcatacgcttaattcaatca

SEQ ID NO: 5719 - DNA, 149 bp, synthetic construct
  source 1..149: mol_type = other DNA
tgattgaattatgccgcttgattgaattatgcttttgattgaattatgatcttgattgaattatacgcttgattgaattatgccgcttgattgaattatgcttttgattgaattatgatcttgattgaattatacgcttgattgaatta

SEQ ID NO: 5720 - DNA, 149 bp, synthetic construct
  source 1..149: mol_type = other DNA
taatttaatcatgccgcttaatttaatcatgcttttaatttaatcatgatcttaatttaatcatacgcttaatttaatcatgccgcttaatttaatcatgcttttaatttaatcatgatcttaatttaatcatacgcttaatttaatca

SEQ ID NO: 5721 - DNA, 149 bp, synthetic construct
  source 1..149: mol_type = other DNA
tgattaaattatgccgcttgattaaattatgcttttgattaaattatgatcttgattaaattatacgcttgattaaattatgccgcttgattaaattatgcttttgattaaattatgatcttgattaaattatacgcttgattaaatta

SEQ ID NO: 5722 - DNA, 147 bp, synthetic construct
  source 1..147: mol_type = other DNA
tgctgagtcagcatgcttttgctgagtcagcatgatcttgctgagtcagcatacgcttgctgagtcagcatgccgcttgctgagtcagcatgcttttgctgagtcagcatgatcttgctgagtcagcatacgcttgctgagtcagca

SEQ ID NO: 5723 - DNA, 147 bp, synthetic construct
  source 1..147: mol_type = other DNA
tgctgactcagcatgcttttgctgactcagcatgatcttgctgactcagcatacgcttgctgactcagcatgccgcttgctgactcagcatgcttttgctgactcagcatgatcttgctgactcagcatacgcttgctgactcagca

SEQ ID NO: 5724 - DNA, 147 bp, synthetic construct; identical to SEQ ID NO: 5723
  source 1..147: mol_type = other DNA

SEQ ID NO: 5725 - DNA, 147 bp, synthetic construct; identical to SEQ ID NO: 5722
  source 1..147: mol_type = other DNA

SEQ ID NO: 5726 - DNA, 149 bp, synthetic construct
  source 1..149: mol_type = other DNA
gagttcatcgagttcatgatctgagttcatcgagttcatacgctgagttcatcgagttcatgccgctgagttcatcgagttcatgctttgagttcatcgagttcatgatctgagttcatcgagttcatacgctgagttcatcgagttca

SEQ ID NO: 5727 - DNA, 149 bp, synthetic construct
  source 1..149: mol_type = other DNA
tgaactcgatgaactctgatcttgaactcgatgaactctacgcttgaactcgatgaactctgccgcttgaactcgatgaactctgcttttgaactcgatgaactctgatcttgaactcgatgaactctacgcttgaactcgatgaactc

SEQ ID NO: 5728 - DNA, 149 bp, synthetic construct
  source 1..149: mol_type = other DNA
gagttcatcgggttcatgatctgagttcatcgggttcatacgctgagttcatcgggttcatgccgctgagttcatcgggttcatgctttgagttcatcgggttcatgatctgagttcatcgggttcatacgctgagttcatcgggttca

SEQ ID NO: 5729 - DNA, 149 bp, synthetic construct
  source 1..149: mol_type = other DNA
tgaacccgatgaactctgatcttgaacccgatgaactctacgcttgaacccgatgaactctgccgcttgaacccgatgaactctgcttttgaacccgatgaactctgatcttgaacccgatgaactctacgcttgaacccgatgaactc

SEQ ID NO: 5730 - DNA, 149 bp, synthetic construct
  source 1..149: mol_type = other DNA
gagttcattgagttcatgatctgagttcattgagttcatacgctgagttcattgagttcatgccgctgagttcattgagttcatgctttgagttcattgagttcatgatctgagttcattgagttcatacgctgagttcattgagttca

SEQ ID NO: 5731 - DNA, 149 bp, synthetic construct
  source 1..149: mol_type = other DNA
tgaactcaatgaactctgatcttgaactcaatgaactctacgcttgaactcaatgaactctgccgcttgaactcaatgaactctgcttttgaactcaatgaactctgatcttgaactcaatgaactctacgcttgaactcaatgaactc

SEQ ID NO: 5732 - DNA, 149 bp, synthetic construct
  source 1..149: mol_type = other DNA
gagttcattgggttcatgatctgagttcattgggttcatacgctgagttcattgggttcatgccgctgagttcattgggttcatgctttgagttcattgggttcatgatctgagttcattgggttcatacgctgagttcattgggttca

SEQ ID NO: 5733 - DNA, 149 bp, synthetic construct
  source 1..149: mol_type = other DNA
tgaacccaatgaactctgatcttgaacccaatgaactctacgcttgaacccaatgaactctgccgcttgaacccaatgaactctgcttttgaacccaatgaactctgatcttgaacccaatgaactctacgcttgaacccaatgaactc

SEQ ID NO: 5734 - DNA, 149 bp, synthetic construct
  source 1..149: mol_type = other DNA
gggttcatcgagttcatgatctgggttcatcgagttcatacgctgggttcatcgagttcatgccgctgggttcatcgagttcatgctttgggttcatcgagttcatgatctgggttcatcgagttcatacgctgggttcatcgagttca

SEQ ID NO: 5735 - DNA, 149 bp, synthetic construct
  source 1..149: mol_type = other DNA
tgaactcgatgaaccctgatcttgaactcgatgaaccctacgcttgaactcgatgaaccctgccgcttgaactcgatgaaccctgcttttgaactcgatgaaccctgatcttgaactcgatgaaccctacgcttgaactcgatgaaccc

SEQ ID NO: 5736 - DNA, 149 bp, synthetic construct
  source 1..149: mol_type = other DNA
gggttcatcgggttcatgatctgggttcatcgggttcatacgctgggttcatcgggttcatgccgctgggttcatcgggttcatgctttgggttcatcgggttcatgatctgggttcatcgggttcatacgctgggttcatcgggttca

SEQ ID NO: 5737 - DNA, 149 bp, synthetic construct
  source 1..149: mol_type = other DNA
tgaacccgatgaaccctgatcttgaacccgatgaaccctacgcttgaacccgatgaaccctgccgcttgaacccgatgaaccctgcttttgaacccgatgaaccctgatcttgaacccgatgaaccctacgcttgaacccgatgaaccc

SEQ ID NO: 5738 - DNA, 149 bp, synthetic construct
  source 1..149: mol_type = other DNA
gggttcattgagttcatgatctgggttcattgagttcatacgctgggttcattgagttcatgccgctgggttcattgagttcatgctttgggttcattgagttcatgatctgggttcattgagttcatacgctgggttcattgagttca

SEQ ID NO: 5739 - DNA, 149 bp, synthetic construct
  source 1..149: mol_type = other DNA
tgaactcaatgaaccctgatcttgaactcaatgaaccctacgcttgaactcaatgaaccctgccgcttgaactcaatgaaccctgcttttgaactcaatgaaccctgatcttgaactcaatgaaccctacgcttgaactcaatgaaccc

SEQ ID NO: 5740 - DNA, 149 bp, synthetic construct
  source 1..149: mol_type = other DNA
gggttcattgggttcatgatctgggttcattgggttcatacgctgggttcattgggttcatgccgctgggttcattgggttcatgctttgggttcattgggttcatgatctgggttcattgggttcatacgctgggttcattgggttca

SEQ ID NO: 5741 - DNA, 149 bp, synthetic construct
  source 1..149: mol_type = other DNA
tgaacccaatgaaccctgatcttgaacccaatgaaccctacgcttgaacccaatgaaccctgccgcttgaacccaatgaaccctgcttttgaacccaatgaaccctgatcttgaacccaatgaaccctacgcttgaacccaatgaaccc

SEQ ID NO: 5742 - DNA, 142 bp, synthetic construct
  source 1..142: mol_type = other DNA
ctttcattatgactatgatctctttcattatgactatacgctctttcattatgactatgccgctctttcattatgactatgctttctttcattatgactatgatctctttcattatgactatacgctctttcattatgacta

SEQ ID NO: 5743 - DNA, 142 bp, synthetic construct
  source 1..142: mol_type = other DNA
tagtcataatgaaagtgatcttagtcataatgaaagtacgcttagtcataatgaaagtgccgcttagtcataatgaaagtgcttttagtcataatgaaagtgatcttagtcataatgaaagtacgcttagtcataatgaaag

SEQ ID NO: 5744 - DNA, 142 bp, synthetic construct
  source 1..142: mol_type = other DNA
ctttcattatgactctgatctctttcattatgactctacgctctttcattatgactctgccgctctttcattatgactctgctttctttcattatgactctgatctctttcattatgactctacgctctttcattatgactc

SEQ ID NO: 5745 - DNA, 142 bp, synthetic construct
  source 1..142: mol_type = other DNA
gagtcataatgaaagtgatctgagtcataatgaaagtacgctgagtcataatgaaagtgccgctgagtcataatgaaagtgctttgagtcataatgaaagtgatctgagtcataatgaaagtacgctgagtcataatgaaag

SEQ ID NO: 5746 - DNA, 142 bp, synthetic construct
  source 1..142: mol_type = other DNA
ctttcattatgactgtgatctctttcattatgactgtacgctctttcattatgactgtgccgctctttcattatgactgtgctttctttcattatgactgtgatctctttcattatgactgtacgctctttcattatgactg

SEQ ID NO: 5747 - DNA, 142 bp, synthetic construct
  source 1..142: mol_type = other DNA
cagtcataatgaaagtgatctcagtcataatgaaagtacgctcagtcataatgaaagtgccgctcagtcataatgaaagtgctttcagtcataatgaaagtgatctcagtcataatgaaagtacgctcagtcataatgaaag

SEQ ID NO: 5748 - DNA, 149 bp, synthetic construct
  source 1..149: mol_type = other DNA
gaccacccatgtgccgctgaccacccatgtgctttgaccacccatgtgatctgaccacccatgtacgctgaccacccatgtgccgctgaccacccatgtgctttgaccacccatgtgatctgaccacccatgtacgctgaccacccatg

SEQ ID NO: 5749 - DNA, 149 bp, synthetic construct
  source 1..149: mol_type = other DNA
catgggtggtctgccgctcatgggtggtctgctttcatgggtggtctgatctcatgggtggtctacgctcatgggtggtctgccgctcatgggtggtctgctttcatgggtggtctgatctcatgggtggtctacgctcatgggtggtc

SEQ ID NO: 5750 - DNA, 125 bp, synthetic construct
  source 1..125: mol_type = other DNA
catcccatacggatgaggcatgccgctcatcccatacggatgaggcatgctttcatcccatacggatgaggcatgatctcatcccatacggatgaggcatacgctcatcccatacggatgaggca

SEQ ID NO: 5751 - DNA, 125 bp, synthetic construct
  source 1..125: mol_type = other DNA
tgcctcatccgtatgggatgtgccgcttgcctcatccgtatgggatgtgcttttgcctcatccgtatgggatgtgatcttgcctcatccgtatgggatgtacgcttgcctcatccgtatgggatg

SEQ ID NO: 5752 - DNA, 125 bp, synthetic construct
  source 1..125: mol_type = other DNA
catcccatacggatgaggcctgccgctcatcccatacggatgaggcctgctttcatcccatacggatgaggcctgatctcatcccatacggatgaggcctacgctcatcccatacggatgaggcc

SEQ ID NO: 5753 - DNA, 125 bp, synthetic construct
  source 1..125: mol_type = other DNA
ggcctcatccgtatgggatgtgccgctggcctcatccgtatgggatgtgctttggcctcatccgtatgggatgtgatctggcctcatccgtatgggatgtacgctggcctcatccgtatgggatg

SEQ ID NO: 5754 - DNA, 125 bp, synthetic construct
  source 1..125: mol_type = other DNA
catcccatacggatgaggtatgccgctcatcccatacggatgaggtatgctttcatcccatacggatgaggtatgatctcatcccatacggatgaggtatacgctcatcccatacggatgaggta

SEQ ID NO: 5755 - DNA, 125 bp, synthetic construct
  source 1..125: mol_type = other DNA
tacctcatccgtatgggatgtgccgcttacctcatccgtatgggatgtgcttttacctcatccgtatgggatgtgatcttacctcatccgtatgggatgtacgcttacctcatccgtatgggatg

SEQ ID NO: 5756 - DNA, 125 bp, synthetic construct
  source 1..125: mol_type = other DNA
catcccatacggatgaggtctgccgctcatcccatacggatgaggtctgctttcatcccatacggatgaggtctgatctcatcccatacggatgaggtctacgctcatcccatacggatgaggtc

SEQ ID NO: 5757 - DNA, 125 bp, synthetic construct
  source 1..125: mol_type = other DNA
gacctcatccgtatgggatgtgccgctgacctcatccgtatgggatgtgctttgacctcatccgtatgggatgtgatctgacctcatccgtatgggatgtacgctgacctcatccgtatgggatg

SEQ ID NO: 5758 - DNA, 125 bp, synthetic construct
  source 1..125: mol_type = other DNA
catcccatacggatgagtcatgccgctcatcccatacggatgagtcatgctttcatcccatacggatgagtcatgatctcatcccatacggatgagtcatacgctcatcccatacggatgagtca

SEQ ID NO: 5759 - DNA, 125 bp, synthetic construct
  source 1..125: mol_type = other DNA
tgactcatccgtatgggatgtgccgcttgactcatccgtatgggatgtgcttttgactcatccgtatgggatgtgatcttgactcatccgtatgggatgtacgcttgactcatccgtatgggatg

SEQ ID NO: 5760 - DNA, 125 bp, synthetic construct
  source 1..125: mol_type = other DNA
catcccatacggatgagtcctgccgctcatcccatacggatgagtcctgctttcatcccatacggatgagtcctgatctcatcccatacggatgagtcctacgctcatcccatacggatgagtcc

SEQ ID NO: 5761 - DNA, 125 bp, synthetic construct
  source 1..125: mol_type = other DNA
ggactcatccgtatgggatgtgccgctggactcatccgtatgggatgtgctttggactcatccgtatgggatgtgatctggactcatccgtatgggatgtacgctggactcatccgtatgggatg

SEQ ID NO: 5762 - DNA, 125 bp, synthetic construct
  source 1..125: mol_type = other DNA
catcccatacggatgagttatgccgctcatcccatacggatgagttatgctttcatcccatacggatgagttatgatctcatcccatacggatgagttatacgctcatcccatacggatgagtta

SEQ ID NO: 5763 - DNA, 125 bp, synthetic construct
  source 1..125: mol_type = other DNA
taactcatccgtatgggatgtgccgcttaactcatccgtatgggatgtgcttttaactcatccgtatgggatgtgatcttaactcatccgtatgggatgtacgcttaactcatccgtatgggatg

SEQ ID NO: 5764 - DNA, 125 bp, synthetic construct
  source 1..125: mol_type = other DNA
catcccatacggatgagttctgccgctcatcccatacggatgagttctgctttcatcccatacggatgagttctgatctcatcccatacggatgagttctacgctcatcccatacggatgagttc

SEQ ID NO: 5765 - DNA, 125 bp, synthetic construct
  source 1..125: mol_type = other DNA
gaactcatccgtatgggatgtgccgctgaactcatccgtatgggatgtgctttgaactcatccgtatgggatgtgatctgaactcatccgtatgggatgtacgctgaactcatccgtatgggatg

SEQ ID NO: 5766 - DNA, 125 bp, synthetic construct
  source 1..125: mol_type = other DNA
catcccatacggatgacgcatgccgctcatcccatacggatgacgcatgctttcatcccatacggatgacgcatgatctcatcccatacggatgacgcatacgctcatcccatacggatgacgca

SEQ ID NO: 5767 - DNA, 125 bp, synthetic construct
  source 1..125: mol_type = other DNA
tgcgtcatccgtatgggatgtgccgcttgcgtcatccgtatgggatgtgcttttgcgtcatccgtatgggatgtgatcttgcgtcatccgtatgggatgtacgcttgcgtcatccgtatgggatg

SEQ ID NO: 5768 - DNA, 125 bp, synthetic construct
  source 1..125: mol_type = other DNA
catcccatacggatgacgcctgccgctcatcccatacggatgacgcctgctttcatcccatacggatgacgcctgatctcatcccatacggatgacgcctacgctcatcccatacggatgacgcc

SEQ ID NO: 5769 - DNA, 125 bp, synthetic construct
  source 1..125: mol_type = other DNA
ggcgtcatccgtatgggatgtgccgctggcgtcatccgtatgggatgtgctttggcgtcatccgtatgggatgtgatctggcgtcatccgtatgggatgtacgctggcgtcatccgtatgggatg

SEQ ID NO: 5770 - DNA, 125 bp, synthetic construct
  source 1..125: mol_type = other DNA
catcccatacggatgacgtatgccgctcatcccatacggatgacgtatgctttcatcccatacggatgacgtatgatctcatcccatacggatgacgtatacgctcatcccatacggatgacgta

SEQ ID NO: 5771 - DNA, 125 bp, synthetic construct
  source 1..125: mol_type = other DNA
tacgtcatccgtatgggatgtgccgcttacgtcatccgtatgggatgtgcttttacgtcatccgtatgggatgtgatcttacgtcatccgtatgggatgtacgcttacgtcatccgtatgggatg

SEQ ID NO: 5772 - DNA, 125 bp, synthetic construct
  source 1..125: mol_type = other DNA
catcccatacggatgacgtctgccgctcatcccatacggatgacgtctgctttcatcccatacggatgacgtctgatctcatcccatacggatgacgtctacgctcatcccatacggatgacgtc

SEQ ID NO: 5773 - DNA, 125 bp, synthetic construct
  source 1..125: mol_type = other DNA
gacgtcatccgtatgggatgtgccgctgacgtcatccgtatgggatgtgctttgacgtcatccgtatgggatgtgatctgacgtcatccgtatgggatgtacgctgacgtcatccgtatgggatg

SEQ ID NO: 5774 - DNA, 125 bp, synthetic construct
  source 1..125: mol_type = other DNA
catcccatacggatgactcatgccgctcatcccatacggatgactcatgctttcatcccatacggatgactcatgatctcatcccatacggatgactcatacgctcatcccatacggatgactca

SEQ ID NO: 5775 - DNA, 125 bp, synthetic construct
  source 1..125: mol_type = other DNA
tgagtcatccgtatgggatgtgccgcttgagtcatccgtatgggatgtgcttttgagtcatccgtatgggatgtgatcttgagtcatccgtatgggatgtacgcttgagtcatccgtatgggatg

SEQ ID NO: 5776 - DNA, 125 bp, synthetic construct
  source 1..125: mol_type = other DNA
catcccatacggatgactcctgccgctcatcccatacggatgactcctgctttcatcccatacggatgactcctgatctcatcccatacggatgactcctacgctcatcccatacggatgactcc

SEQ ID NO: 5777 - DNA, 125 bp, synthetic construct
  source 1..125: mol_type = other DNA
ggagtcatccgtatgggatgtgccgctggagtcatccgtatgggatgtgctttggagtcatccgtatgggatgtgatctggagtcatccgtatgggatgtacgctggagtcatccgtatgggatg

SEQ ID NO: 5778 - DNA, 125 bp, synthetic construct
  source 1..125: mol_type = other DNA
catcccatacggatgacttatgccgctcatcccatacggatgacttatgctttcatcccatacggatgacttatgatctcatcccatacggatgacttatacgctcatcccatacggatgactta

SEQ ID NO: 5779 - DNA, 125 bp, synthetic construct
  source 1..125: mol_type = other DNA
taagtcatccgtatgggatgtgccgcttaagtcatccgtatgggatgtgcttttaagtcatccgtatgggatgtgatcttaagtcatccgtatgggatgtacgcttaagtcatccgtatgggatg

SEQ ID NO: 5780 - DNA, 125 bp, synthetic construct
  source 1..125: mol_type = other DNA
catcccatacggatgacttctgccgctcatcccatacggatgacttctgctttcatcccatacggatgacttctgatctcatcccatacggatgacttctacgctcatcccatacggatgacttc

SEQ ID NO: 5781 - DNA, 125 bp, synthetic construct
  source 1..125: mol_type = other DNA
gaagtcatccgtatgggatgtgccgctgaagtcatccgtatgggatgtgctttgaagtcatccgtatgggatgtgatctgaagtcatccgtatgggatgtacgctgaagtcatccgtatgggatg

SEQ ID NO: 5782 - DNA, 125 bp, synthetic construct
  source 1..125: mol_type = other DNA
catcccatacgggtgaggcatgccgctcatcccatacgggtgaggcatgctttcatcccatacgggtgaggcatgatctcatcccatacgggtgaggcatacgctcatcccatacgggtgaggca

SEQ ID NO: 5783 - DNA, 125 bp, synthetic construct
  source 1..125: mol_type = other DNA
tgcctcacccgtatgggatgtgccgcttgcctcacccgtatgggatgtgcttttgcctcacccgtatgggatgtgatcttgcctcacccgtatgggatgtacgcttgcctcacccgtatgggatg

SEQ ID NO: 5784 - DNA, 125 bp, synthetic construct
  source 1..125: mol_type = other DNA
catcccatacgggtgaggcctgccgctcatcccatacgggtgaggcctgctttcatcccatacgggtgaggcctgatctcatcccatacgggtgaggcctacgctcatcccatacgggtgaggcc

SEQ ID NO: 5785 - DNA, 125 bp, synthetic construct
  source 1..125: mol_type = other DNA
ggcctcacccgtatgggatgtgccgctggcctcacccgtatgggatgtgctttggcctcacccgtatgggatgtgatctggcctcacccgtatgggatgtacgctggcctcacccgtatgggatg

SEQ ID NO: 5786 - DNA, 125 bp, synthetic construct
  source 1..125: mol_type = other DNA
catcccatacgggtgaggtatgccgctcatcccatacgggtgaggtatgctttcatcccatacgggtgaggtatgatctcatcccatacgggtgaggtatacgctcatcccatacgggtgaggta

SEQ ID NO: 5787 - DNA, 125 bp, synthetic construct
  source 1..125: mol_type = other DNA
tacctcacccgtatgggatgtgccgcttacctcacccgtatgggatgtgcttttacctcacccgtatgggatgtgatcttacctcacccgtatgggatgtacgcttacctcacccgtatgggatg

SEQ ID NO: 5788 - DNA, 125 bp, synthetic construct
  source 1..125: mol_type = other DNA
catcccatacgggtgaggtctgccgctcatcccatacgggtgaggtctgctttcatcccatacgggtgaggtctgatctcatcccatacgggtgaggtctacgctcatcccatacgggtgaggtc

SEQ ID NO: 5789 - DNA, 125 bp, synthetic construct
  source 1..125: mol_type = other DNA
gacctcacccgtatgggatgtgccgctgacctcacccgtatgggatgtgctttgacctcacccgtatgggatgtgatctgacctcacccgtatgggatgtacgctgacctcacccgtatgggatg

SEQ ID NO: 5790 - DNA, 125 bp, synthetic construct
  source 1..125: mol_type = other DNA
catcccatacgggtgagtcatgccgctcatcccatacgggtgagtcatgctttcatcccatacgggtgagtcatgatctcatcccatacgggtgagtcatacgctcatcccatacgggtgagtca

SEQ ID NO: 5791 - DNA, 125 bp, synthetic construct
  source 1..125: mol_type = other DNA
tgactcacccgtatgggatgtgccgcttgactcacccgtatgggatgtgcttttgactcacccgtatgggatgtgatcttgactcacccgtatgggatgtacgcttgactcacccgtatgggatg

SEQ ID NO: 5792 - DNA, 125 bp, synthetic construct
  source 1..125: mol_type = other DNA
catcccatacgggtgagtcctgccgctcatcccatacgggtgagtcctgctttcatcccatacgggtgagtcctgatctcatcccatacgggtgagtcctacgctcatcccatacgggtgagtcc

SEQ ID NO: 5793 - DNA, 125 bp, synthetic construct
  source 1..125: mol_type = other DNA
ggactcacccgtatgggatgtgccgctggactcacccgtatgggatgtgctttggactcacccgtatgggatgtgatctggactcacccgtatgggatgtacgctggactcacccgtatgggatg

SEQ ID NO: 5794 - DNA, 125 bp, synthetic construct
  source 1..125: mol_type = other DNA
catcccatacgggtgagttatgccgctcatcccatacgggtgagttatgctttcatcccatacgggtgagttatgatctcatcccatacgggtgagttatacgctcatcccatacgggtgagtta

SEQ ID NO: 5795 - DNA, 125 bp, synthetic construct
  source 1..125: mol_type = other DNA
taactcacccgtatgggatgtgccgcttaactcacccgtatgggatgtgcttttaactcacccgtatgggatgtgatcttaactcacccgtatgggatgtacgcttaactcacccgtatgggatg

SEQ ID NO: 5796 - DNA, 125 bp, synthetic construct
  source 1..125: mol_type = other DNA
catcccatacgggtgagttctgccgctcatcccatacgggtgagttctgctttcatcccatacgggtgagttctgatctcatcccatacgggtgagttctacgctcatcccatacgggtgagttc

SEQ ID NO: 5797 - DNA, 125 bp, synthetic construct
  source 1..125: mol_type = other DNA
gaactcacccgtatgggatgtgccgctgaactcacccgtatgggatgtgctttgaactcacccgtatgggatgtgatctgaactcacccgtatgggatgtacgctgaactcacccgtatgggatg

SEQ ID NO: 5798 - DNA, 125 bp, synthetic construct
  source 1..125: mol_type = other DNA
catcccatacgggtgacgcatgccgctcatcccatacgggtgacgcatgctttcatcccatacgggtgacgcatgatctcatcccatacgggtgacgcatacgctcatcccatacgggtgacgca

SEQ ID NO: 5799 - DNA, 125 bp, synthetic construct
  source 1..125: mol_type = other DNA
tgcgtcacccgtatgggatgtgccgcttgcgtcacccgtatgggatgtgcttttgcgtcacccgtatgggatgtgatcttgcgtcacccgtatgggatgtacgcttgcgtcacccgtatgggatg

SEQ ID NO: 5800 - DNA, 125 bp, synthetic construct
  source 1..125: mol_type = other DNA
catcccatacgggtgacgcctgccgctcatcccatacgggtgacgcctgctttcatcccatacgggtgacgcctgatctcatcccatacgggtgacgcctacgctcatcccatacgggtgacgcc

SEQ ID NO: 5801 - DNA, 125 bp, synthetic construct
  source 1..125: mol_type = other DNA
ggcgtcacccgtatgggatgtgccgctggcgtcacccgtatgggatgtgctttggcgtcacccgtatgggatgtgatctggcgtcacccgtatgggatgtacgctggcgtcacccgtatgggatg

SEQ ID NO: 5802 - DNA, 125 bp, synthetic construct
  source 1..125: mol_type = other DNA
catcccatacgggtgacgtatgccgctcatcccatacgggtgacgtatgctttcatcccatacgggtgacgtatgatctcatcccatacgggtgacgtatacgctcatcccatacgggtgacgta

SEQ ID NO: 5803 - DNA, 125 bp, synthetic construct
  source 1..125: mol_type = other DNA
tacgtcacccgtatgggatgtgccgcttacgtcacccgtatgggatgtgcttttacgtcacccgtatgggatgtgatcttacgtcacccgtatgggatgtacgcttacgtcacccgtatgggatg

SEQ ID NO: 5804 - DNA, 125 bp, synthetic construct
  source 1..125: mol_type = other DNA
catcccatacgggtgacgtctgccgctcatcccatacgggtgacgtctgctttcatcccatacgggtgacgtctgatctcatcccatacgggtgacgtctacgctcatcccatacgggtgacgtc

SEQ ID NO: 5805 - DNA, 125 bp, synthetic construct
  source 1..125: mol_type = other DNA
gacgtcacccgtatgggatgtgccgctgacgtcacccgtatgggatgtgctttgacgtcacccgtatgggatgtgatctgacgtcacccgtatgggatgtacgctgacgtcacccgtatgggatg

SEQ ID NO: 5806 - DNA, 125 bp, synthetic construct
  source 1..125: mol_type = other DNA
catcccatacgggtgactcatgccgctcatcccatacgggtgactcatgctttcatcccatacgggtgactcatgatctcatcccatacgggtgactcatacgctcatcccatacgggtgactca

SEQ ID NO: 5807 - DNA, 125 bp, synthetic construct
  source 1..125: mol_type = other DNA
tgagtcacccgtatgggatgtgccgcttgagtcacccgtatgggatgtgcttttgagtcacccgtatgggatgtgatcttgagtcacccgtatgggatgtacgcttgagtcacccgtatgggatg

SEQ ID NO: 5808 - DNA, 125 bp, synthetic construct
  source 1..125: mol_type = other DNA
catcccatacgggtgactcctgccgctcatcccatacgggtgactcctgctttcatcccatacgggtgactcctgatctcatcccatacgggtgactcctacgctcatcccatacgggtgactcc

SEQ ID NO: 5809 - DNA, 125 bp, synthetic construct
  source 1..125: mol_type = other DNA
ggagtcacccgtatgggatgtgccgctggagtcacccgtatgggatgtgctttggagtcacccgtatgggatgtgatctggagtcacccgtatgggatgtacgctggagtcacccgtatgggatg

SEQ ID NO: 5810 - DNA, 125 bp, synthetic construct
  source 1..125: mol_type = other DNA
catcccatacgggtgacttatgccgctcatcccatacgggtgacttatgctttcatcccatacgggtgacttatgatctcatcccatacgggtgacttatacgctcatcccatacgggtgactta

SEQ ID NO: 5811 - DNA, 125 bp, synthetic construct
  source 1..125: mol_type = other DNA
taagtcacccgtatgggatgtgccgcttaagtcacccgtatgggatgtgcttttaagtcacccgtatgggatgtgatcttaagtcacccgtatgggatgtacgcttaagtcacccgtatgggatg

SEQ ID NO: 5812 - DNA, 125 bp, synthetic construct
  source 1..125: mol_type = other DNA
catcccatacgggtgacttctgccgctcatcccatacgggtgacttctgctttcatcccatacgggtgacttctgatctcatcccatacgggtgacttctacgctcatcccatacgggtgacttc

SEQ ID NO: 5813 - DNA, 125 bp, synthetic construct
  source 1..125: mol_type = other DNA
gaagtcacccgtatgggatgtgccgctgaagtcacccgtatgggatgtgctttgaagtcacccgtatgggatgtgatctgaagtcacccgtatgggatgtacgctgaagtcacccgtatgggatg

SEQ ID NO: 5814 - DNA, 125 bp, synthetic construct
  source 1..125: mol_type = other DNA
catcccttacggatgaggcatgccgctcatcccttacggatgaggcatgctttcatcccttacggatgaggcatgatctcatcccttacggatgaggcatacgctcatcccttacggatgaggca

SEQ ID NO: 5815 - DNA, 125 bp, synthetic construct
  source 1..125: mol_type = other DNA
tgcctcatccgtaagggatgtgccgcttgcctcatccgtaagggatgtgcttttgcctcatccgtaagggatgtgatcttgcctcatccgtaagggatgtacgcttgcctcatccgtaagggatg

SEQ ID NO: 5816 - DNA, 125 bp, synthetic construct
  source 1..125: mol_type = other DNA
catcccttacggatgaggcctgccgctcatcccttacggatgaggcctgctttcatcccttacggatgaggcctgatctcatcccttacggatgaggcctacgctcatcccttacggatgaggcc

SEQ ID NO: 5817 - DNA, 125 bp, synthetic construct
  source 1..125: mol_type = other DNA
ggcctcatccgtaagggatgtgccgctggcctcatccgtaagggatgtgctttggcctcatccgtaagggatgtgatctggcctcatccgtaagggatgtacgctggcctcatccgtaagggatg

SEQ ID NO: 5818 - DNA, 125 bp, synthetic construct
  source 1..125: mol_type = other DNA
catcccttacggatgaggtatgccgctcatcccttacggatgaggtatgctttcatcccttacggatgaggtatgatctcatcccttacggatgaggtatacgctcatcccttacggatgaggta

SEQ ID NO: 5819 - DNA, 125 bp, synthetic construct
  source 1..125: mol_type = other DNA
tacctcatccgtaagggatgtgccgcttacctcatccgtaagggatgtgcttttacctcatccgtaagggatgtgatcttacctcatccgtaagggatgtacgcttacctcatccgtaagggatg

SEQ ID NO: 5820 - DNA, 125 bp, synthetic construct
  source 1..125: mol_type = other DNA
catcccttacggatgaggtctgccgctcatcccttacggatgaggtctgctttcatcccttacggatgaggtctgatctcatcccttacggatgaggtctacgctcatcccttacggatgaggtc

SEQ ID NO: 5821 - DNA, 125 bp, synthetic construct
  source 1..125: mol_type = other DNA
gacctcatccgtaagggatgtgccgctgacctcatccgtaagggatgtgctttgacctcatccgtaagggatgtgatctgacctcatccgtaagggatgtacgctgacctcatccgtaagggatg

SEQ ID NO: 5822 - DNA, 125 bp, synthetic construct
  source 1..125: mol_type = other DNA
catcccttacggatgagtcatgccgctcatcccttacggatgagtcatgctttcatcccttacggatgagtcatgatctcatcccttacggatgagtcatacgctcatcccttacggatgagtca

SEQ ID NO: 5823 - DNA, 125 bp, synthetic construct
  source 1..125: mol_type = other DNA
tgactcatccgtaagggatgtgccgcttgactcatccgtaagggatgtgcttttgactcatccgtaagggatgtgatcttgactcatccgtaagggatgtacgcttgactcatccgtaagggatg

SEQ ID NO: 5824 - DNA, 125 bp, synthetic construct
  source 1..125: mol_type = other DNA
catcccttacggatgagtcctgccgctcatcccttacggatgagtcctgctttcatcccttacggatgagtcctgatctcatcccttacggatgagtcctacgctcatcccttacggatgagtcc

SEQ ID NO: 5825 - DNA, 125 bp, synthetic construct
  source 1..125: mol_type = other DNA
ggactcatccgtaagggatgtgccgctggactcatccgtaagggatgtgctttggactcatccgtaagggatgtgatctggactcatccgtaagggatgtacgctggactcatccgtaagggatg

SEQ ID NO: 5826 - DNA, 125 bp, synthetic construct
  source 1..125: mol_type = other DNA
catcccttacggatgagttatgccgctcatcccttacggatgagttatgctttcatcccttacggatgagttatgatctcatcccttacggatgagttatacgctcatcccttacggatgagtta

SEQ ID NO: 5827 - DNA, 125 bp, synthetic construct
  source 1..125: mol_type = other DNA
taactcatccgtaagggatgtgccgcttaactcatccgtaagggatgtgcttttaactcatccgtaagggatgtgatcttaactcatccgtaagggatgtacgcttaactcatccgtaagggatg

SEQ ID NO: 5828 - DNA, 125 bp, synthetic construct
  source 1..125: mol_type = other DNA
catcccttacggatgagttctgccgctcatcccttacggatgagttctgctttcatcccttacggatgagttctgatctcatcccttacggatgagttctacgctcatcccttacggatgagttc

SEQ ID NO: 5829 - DNA, 125 bp, synthetic construct
  source 1..125: mol_type = other DNA
gaactcatccgtaagggatgtgccgctgaactcatccgtaagggatgtgctttgaactcatccgtaagggatgtgatctgaactcatccgtaagggatgtacgctgaactcatccgtaagggatg

SEQ ID NO: 5830 - DNA, 125 bp, synthetic construct
  source 1..125: mol_type = other DNA
catcccttacggatgacgcatgccgctcatcccttacggatgacgcatgctttcatcccttacggatgacgcatgatctcatcccttacggatgacgcatacgctcatcccttacggatgacgca

SEQ ID NO: 5831 - DNA, 125 bp, synthetic construct
  source 1..125: mol_type = other DNA
tgcgtcatccgtaagggatgtgccgcttgcgtcatccgtaagggatgtgcttttgcgtcatccgtaagggatgtgatcttgcgtcatccgtaagggatgtacgcttgcgtcatccgtaagggatg

SEQ ID NO: 5832 - DNA, 125 bp, synthetic construct
  source 1..125: mol_type = other DNA
catcccttacggatgacgcctgccgctcatcccttacggatgacgcctgctttcatcccttacggatgacgcctgatctcatcccttacggatgacgcctacgctcatcccttacggatgacgcc

SEQ ID NO: 5833 - DNA, 125 bp, synthetic construct
  source 1..125: mol_type = other DNA
ggcgtcatccgtaagggatgtgccgctggcgtcatccgtaagggatgtgctttggcgtcatccgtaagggatgtgatctggcgtcatccgtaagggatgtacgctggcgtcatccgtaagggatg

SEQ ID NO: 5834 - DNA, 125 bp, synthetic construct
  source 1..125: mol_type = other DNA
catcccttacggatgacgtatgccgctcatcccttacggatgacgtatgctttcatcccttacggatgacgtatgatctcatcccttacggatgacgtatacgctcatcccttacggatgacgta

SEQ ID NO: 5835 - DNA, 125 bp, synthetic construct
  source 1..125: mol_type = other DNA
tacgtcatccgtaagggatgtgccgcttacgtcatccgtaagggatgtgcttttacgtcatccgtaagggatgtgatcttacgtcatccgtaagggatgtacgcttacgtcatccgtaagggatg

SEQ ID NO: 5836 - DNA, 125 bp, synthetic construct
  source 1..125: mol_type = other DNA
catcccttacggatgacgtctgccgctcatcccttacggatgacgtctgctttcatcccttacggatgacgtctgatctcatcccttacggatgacgtctacgctcatcccttacggatgacgtc

SEQ ID NO: 5837 - DNA, 125 bp, synthetic construct
  source 1..125: mol_type = other DNA
gacgtcatccgtaagggatgtgccgctgacgtcatccgtaagggatgtgctttgacgtcatccgtaagggatgtgatctgacgtcatccgtaagggatgtacgctgacgtcatccgtaagggatg

SEQ ID NO: 5838 - DNA, 125 bp, synthetic construct
  source 1..125: mol_type = other DNA
catcccttacggatgactcatgccgctcatcccttacggatgactcatgctttcatcccttacggatgactcatgatctcatcccttacggatgactcatacgctcatcccttacggatgactca

SEQ ID NO: 5839 - DNA, 125 bp, synthetic construct
  source 1..125: mol_type = other DNA
tgagtcatccgtaagggatgtgccgcttgagtcatccgtaagggatgtgcttttgagtcatccgtaagggatgtgatcttgagtcatccgtaagggatgtacgcttgagtcatccgtaagggatg

SEQ ID NO: 5840 - DNA, 125 bp, synthetic construct
  source 1..125: mol_type = other DNA
catcccttacggatgactcctgccgctcatcccttacggatgactcctgctttcatcccttacggatgactcctgatctcatcccttacggatgactcctacgctcatcccttacggatgactcc

SEQ ID NO: 5841 - DNA, 125 bp, synthetic construct
  source 1..125: mol_type = other DNA
ggagtcatccgtaagggatgtgccgctggagtcatccgtaagggatgtgctttggagtcatccgtaagggatgtgatctggagtcatccgtaagggatgtacgctggagtcatccgtaagggatg

SEQ ID NO: 5842 - DNA, 125 bp, synthetic construct
  source 1..125: mol_type = other DNA
catcccttacggatgacttatgccgctcatcccttacggatgacttatgctttcatcccttacggatgacttatgatctcatcccttacggatgacttatacgctcatcccttacggatgactta

SEQ ID NO: 5843 - DNA, 125 bp, synthetic construct
  source 1..125: mol_type = other DNA
taagtcatccgtaagggatgtgccgcttaagtcatccgtaagggatgtgcttttaagtcatccgtaagggatgtgatcttaagtcatccgtaagggatgtacgcttaagtcatccgtaagggatg

SEQ ID NO: 5844 - DNA, 125 bp, synthetic construct
  source 1..125: mol_type = other DNA
catcccttacggatgacttctgccgctcatcccttacggatgacttctgctttcatcccttacggatgacttctgatctcatcccttacggatgacttctacgctcatcccttacggatgacttc

SEQ ID NO: 5845 - DNA, 125 bp, synthetic construct
  source 1..125: mol_type = other DNA
gaagtcatccgtaagggatgtgccgctgaagtcatccgtaagggatgtgctttgaagtcatccgtaagggatgtgatctgaagtcatccgtaagggatgtacgctgaagtcatccgtaagggatg

SEQ ID NO: 5846 - DNA, 125 bp, synthetic construct
  source 1..125: mol_type = other DNA
catcccttacgggtgaggcatgccgctcatcccttacgggtgaggcatgctttcatcccttacgggtgaggcatgatctcatcccttacgggtgaggcatacgctcatcccttacgggtgaggca

SEQ ID NO: 5847 - DNA, 125 bp, synthetic construct
  source 1..125: mol_type = other DNA
tgcctcacccgtaagggatgtgccgcttgcctcacccgtaagggatgtgcttttgcctcacccgtaagggatgtgatcttgcctcacccgtaagggatgtacgcttgcctcacccgtaagggatg

SEQ ID NO: 5848 - DNA, 125 bp, synthetic construct
  source 1..125: mol_type = other DNA
catcccttacgggtgaggcctgccgctcatcccttacgggtgaggcctgctttcatcccttacgggtgaggcctgatctcatcccttacgggtgaggcctacgctcatcccttacgggtgaggcc

SEQ ID NO: 5849 - DNA, 125 bp, synthetic construct
  source 1..125: mol_type = other DNA
ggcctcacccgtaagggatgtgccgctggcctcacccgtaagggatgtgctttggcctcacccgtaagggatgtgatctggcctcacccgtaagggatgtacgctggcctcacccgtaagggatg

SEQ ID NO: 5850 - DNA, 125 bp, synthetic construct
  source 1..125: mol_type = other DNA
catcccttacgggtgaggtatgccgctcatcccttacgggtgaggtatgctttcatcccttacgggtgaggtatgatctcatcccttacgggtgaggtatacgctcatcccttacgggtgaggta

SEQ ID NO: 5851 - DNA, 125 bp, synthetic construct
  source 1..125: mol_type = other DNA
tacctcacccgtaagggatgtgccgcttacctcacccgtaagggatgtgcttttacctcacccgtaagggatgtgatcttacctcacccgtaagggatgtacgcttacctcacccgtaagggatg

SEQ ID NO: 5852 - DNA, 125 bp, synthetic construct
  source 1..125: mol_type = other DNA
catcccttacgggtgaggtctgccgctcatcccttacgggtgaggtctgctttcatcccttacgggtgaggtctgatctcatcccttacgggtgaggtctacgctcatcccttacgggtgaggtc

SEQ ID NO: 5853 - DNA, 125 bp, synthetic construct
  source 1..125: mol_type = other DNA
gacctcacccgtaagggatgtgccgctgacctcacccgtaagggatgtgctttgacctcacccgtaagggatgtgatctgacctcacccgtaagggatgtacgctgacctcacccgtaagggatg

SEQ ID NO: 5854 - DNA, 125 bp, synthetic construct
  source 1..125: mol_type = other DNA
catcccttacgggtgagtcatgccgctcatcccttacgggtgagtcatgctttcatcccttacgggtgagtcatgatctcatcccttacgggtgagtcatacgctcatcccttacgggtgagtca

SEQ ID NO: 5855 - DNA, 125 bp, synthetic construct
  source 1..125: mol_type = other DNA
tgactcacccgtaagggatgtgccgcttgactcacccgtaagggatgtgcttttgactcacccgtaagggatgtgatcttgactcacccgtaagggatgtacgcttgactcacccgtaagggatg

SEQ ID NO: 5856 - DNA, 125 bp, synthetic construct
  source 1..125: mol_type = other DNA
catcccttacgggtgagtcctgccgctcatcccttacgggtgagtcctgctttcatcccttacgggtgagtcctgatctcatcccttacgggtgagtcctacgctcatcccttacgggtgagtcc

SEQ ID NO: 5857 - DNA, 125 bp, synthetic construct
  source 1..125: mol_type = other DNA
ggactcacccgtaagggatgtgccgctggactcacccgtaagggatgtgctttggactcacccgtaagggatgtgatctggactcacccgtaagggatgtacgctggactcacccgtaagggatg

SEQ ID NO: 5858 - DNA, 125 bp, synthetic construct
  source 1..125: mol_type = other DNA
catcccttacgggtgagttatgccgctcatcccttacgggtgagttatgctttcatcccttacgggtgagttatgatctcatcccttacgggtgagttatacgctcatcccttacgggtgagtta

SEQ ID NO: 5859 - DNA, 125 bp, synthetic construct
  source 1..125: mol_type = other DNA
taactcacccgtaagggatgtgccgcttaactcacccgtaagggatgtgcttttaactcacccgtaagggatgtgatcttaactcacccgtaagggatgtacgcttaactcacccgtaagggatg

SEQ ID NO: 5860 - DNA, 125 bp, synthetic construct
  source 1..125: mol_type = other DNA
catcccttacgggtgagttctgccgctcatcccttacgggtgagttctgctttcatcccttacgggtgagttctgatctcatcccttacgggtgagttctacgctcatcccttacgggtgagttc

SEQ ID NO: 5861 - DNA, 125 bp, synthetic construct
  source 1..125: mol_type = other DNA
gaactcacccgtaagggatgtgccgctgaactcacccgtaagggatgtgctttgaactcacccgtaagggatgtgatctgaactcacccgtaagggatgtacgctgaactcacccgtaagggatg

SEQ ID NO: 5862 - DNA, 125 bp, synthetic construct
  source 1..125: mol_type = other DNA
catcccttacgggtgacgcatgccgctcatcccttacgggtgacgcatgctttcatcccttacgggtgacgcatgatctcatcccttacgggtgacgcatacgctcatcccttacgggtgacgca

SEQ ID NO: 5863 - DNA, 125 bp, synthetic construct
  source 1..125: mol_type = other DNA
tgcgtcacccgtaagggatgtgccgcttgcgtcacccgtaagggatgtgcttttgcgtcacccgtaagggatgtgatcttgcgtcacccgtaagggatgtacgcttgcgtcacccgtaagggatg

SEQ ID NO: 5864 - DNA, 125 bp, synthetic construct
  source 1..125: mol_type = other DNA
catcccttacgggtgacgcctgccgctcatcccttacgggtgacgcctgctttcatcccttacgggtgacgcctgatctcatcccttacgggtgacgcctacgctcatcccttacgggtgacgcc

SEQ ID NO: 5865 - DNA, 125 bp, synthetic construct
  source 1..125: mol_type = other DNA
ggcgtcacccgtaagggatgtgccgctggcgtcacccgtaagggatgtgctttggcgtcacccgtaagggatgtgatctggcgtcacccgtaagggatgtacgctggcgtcacccgtaagggatg

SEQ ID NO: 5866 - DNA, 125 bp, synthetic construct
  source 1..125: mol_type = other DNA
catcccttacgggtgacgtatgccgctcatcccttacgggtgacgtatgctttcatcccttacgggtgacgtatgatctcatcccttacgggtgacgtatacgctcatcccttacgggtgacgta

SEQ ID NO: 5867 - DNA, 125 bp, synthetic construct
  source 1..125: mol_type = other DNA
tacgtcacccgtaagggatgtgccgcttacgtcacccgtaagggatgtgcttttacgtcacccgtaagggatgtgatcttacgtcacccgtaagggatgtacgcttacgtcacccgtaagggatg

SEQ ID NO: 5868 - DNA, 125 bp, synthetic construct
  source 1..125: mol_type = other DNA
catcccttacgggtgacgtctgccgctcatcccttacgggtgacgtctgctttcatcccttacgggtgacgtctgatctcatcccttacgggtgacgtctacgctcatcccttacgggtgacgtc

SEQ ID NO: 5869 - DNA, 125 bp, synthetic construct
  source 1..125: mol_type = other DNA
gacgtcacccgtaagggatgtgccgctgacgtcacccgtaagggatgtgctttgacgtcacccgtaagggatgtgatctgacgtcacccgtaagggatgtacgctgacgtcacccgtaagggatg

SEQ ID NO: 5870 - DNA, 125 bp, synthetic construct
  source 1..125: mol_type = other DNA
catcccttacgggtgactcatgccgctcatcccttacgggtgactcatgctttcatcccttacgggtgactcatgatctcatcccttacgggtgactcatacgctcatcccttacgggtgactca

SEQ ID NO: 5871 - DNA, 125 bp, synthetic construct
  source 1..125: mol_type = other DNA
tgagtcacccgtaagggatgtgccgcttgagtcacccgtaagggatgtgcttttgagtcacccgtaagggatgtgatcttgagtcacccgtaagggatgtacgcttgagtcacccgtaagggatg

SEQ ID NO: 5872 - DNA, 125 bp, synthetic construct
  source 1..125: mol_type = other DNA
catcccttacgggtgactcctgccgctcatcccttacgggtgactcctgctttcatcccttacgggtgactcctgatctcatcccttacgggtgactcctacgctcatcccttacgggtgactcc

SEQ ID NO: 5873 - DNA, 125 bp, synthetic construct
  source 1..125: mol_type = other DNA
ggagtcacccgtaagggatgtgccgctggagtcacccgtaagggatgtgctttggagtcacccgtaagggatgtgatctggagtcacccgtaagggatgtacgctggagtcacccgtaagggatg

SEQ ID NO: 5874 - DNA, 125 bp, synthetic construct
  source 1..125: mol_type = other DNA
catcccttacgggtgacttatgccgctcatcccttacgggtgacttatgctttcatcccttacgggtgacttatgatctcatcccttacgggtgacttatacgctcatcccttacgggtgactta

SEQ ID NO: 5875 - DNA, 125 bp, synthetic construct
  source 1..125: mol_type = other DNA
taagtcacccgtaagggatgtgccgcttaagtcacccgtaagggatgtgcttttaagtcacccgtaagggatgtgatcttaagtcacccgtaagggatgtacgcttaagtcacccgtaagggatg

SEQ ID NO: 5876 - DNA, 125 bp, synthetic construct
  source 1..125: mol_type = other DNA
catcccttacgggtgacttctgccgctcatcccttacgggtgacttctgctttcatcccttacgggtgacttctgatctcatcccttacgggtgacttctacgctcatcccttacgggtgacttc

SEQ ID NO: 5877 - DNA, 125 bp, synthetic construct
  source 1..125: mol_type = other DNA
gaagtcacccgtaagggatgtgccgctgaagtcacccgtaagggatgtgctttgaagtcacccgtaagggatgtgatctgaagtcacccgtaagggatgtacgctgaagtcacccgtaagggatg

SEQ ID NO: 5878 - DNA, 136 bp, synthetic construct
  source 1..136: mol_type = other DNA
tgacgtcatacgcttgacgtcatgccgcttgacgtcatgcttttgacgtcatgatcttgacgtcatacgcttgacgtcatgccgcttgacgtcatgcttttgacgtcatgatcttgacgtcatacgcttgacgtca

SEQ ID NO: 5879 - DNA, 136 bp, synthetic construct; identical to SEQ ID NO: 5878
  source 1..136: mol_type = other DNA

SEQ ID NO: 5880 - DNA, 149 bp, synthetic construct
  source 1..149: mol_type = other DNA
cctgtcaatcatgccgctcctgtcaatcatgctttcctgtcaatcatgatctcctgtcaatcatacgctcctgtcaatcatgccgctcctgtcaatcatgctttcctgtcaatcatgatctcctgtcaatcatacgctcctgtcaatca

SEQ ID NO: 5881 - DNA, 149 bp, synthetic construct
  source 1..149: mol_type = other DNA
tgattgacaggtgccgcttgattgacaggtgcttttgattgacaggtgatcttgattgacaggtacgcttgattgacaggtgccgcttgattgacaggtgcttttgattgacaggtgatcttgattgacaggtacgcttgattgacagg

SEQ ID NO: 5882 - DNA, 149 bp, synthetic construct
  source 1..149: mol_type = other DNA
gaccacccaagtgccgctgaccacccaagtgctttgaccacccaagtgatctgaccacccaagtacgctgaccacccaagtgccgctgaccacccaagtgctttgaccacccaagtgatctgaccacccaagtacgctgaccacccaag

SEQ ID NO: 5883 - DNA, 149 bp, synthetic construct
  source 1..149: mol_type = other DNA
cttgggtggtctgccgctcttgggtggtctgctttcttgggtggtctgatctcttgggtggtctacgctcttgggtggtctgccgctcttgggtggtctgctttcttgggtggtctgatctcttgggtggtctacgctcttgggtggtc

SEQ ID NO: 5884 - DNA, 149 bp, synthetic construct
  source 1..149: mol_type = other DNA
gaccacccacgtgccgctgaccacccacgtgctttgaccacccacgtgatctgaccacccacgtacgctgaccacccacgtgccgctgaccacccacgtgctttgaccacccacgtgatctgaccacccacgtacgctgaccacccacg

SEQ ID NO: 5885 - DNA, 149 bp, synthetic construct
  source 1..149: mol_type = other DNA
cgtgggtggtctgccgctcgtgggtggtctgctttcgtgggtggtctgatctcgtgggtggtctacgctcgtgggtggtctgccgctcgtgggtggtctgctttcgtgggtggtctgatctcgtgggtggtctacgctcgtgggtggtc

SEQ ID NO: 5886 - DNA, 145 bp, synthetic construct
  source 1..145: mol_type = other DNA
aagtgctgagtcagcagaatacgctaagtgctgagtcagcagaatgccgctaagtgctgagtcagcagaatgctttaagtgctgagtcagcagaatgatctaagtgctgagtcagcagaatacgctaagtgctgagtcagcagaa

SEQ ID NO: 5887 - DNA, 145 bp, synthetic construct
  source 1..145: mol_type = other DNA
ttctgctgactcagcactttacgctttctgctgactcagcactttgccgctttctgctgactcagcactttgctttttctgctgactcagcactttgatctttctgctgactcagcactttacgctttctgctgactcagcactt

SEQ ID NO: 5888 - DNA, 145 bp, synthetic construct
  source 1..145: mol_type = other DNA
aagtgctgagtcagcagattacgctaagtgctgagtcagcagattgccgctaagtgctgagtcagcagattgctttaagtgctgagtcagcagattgatctaagtgctgagtcagcagattacgctaagtgctgagtcagcagat

SEQ ID NO: 5889 - DNA, 145 bp, synthetic construct
  source 1..145: mol_type = other DNA
atctgctgactcagcactttacgctatctgctgactcagcactttgccgctatctgctgactcagcactttgctttatctgctgactcagcactttgatctatctgctgactcagcactttacgctatctgctgactcagcactt

SEQ ID NO: 5890 - DNA, 145 bp, synthetic construct
  source 1..145: mol_type = other DNA
aagtgctgagtcagcagtatacgctaagtgctgagtcagcagtatgccgctaagtgctgagtcagcagtatgctttaagtgctgagtcagcagtatgatctaagtgctgagtcagcagtatacgctaagtgctgagtcagcagta

SEQ ID NO: 5891 - DNA, 145 bp, synthetic construct
  source 1..145: mol_type = other DNA
tactgctgactcagcactttacgcttactgctgactcagcactttgccgcttactgctgactcagcactttgcttttactgctgactcagcactttgatcttactgctgactcagcactttacgcttactgctgactcagcactt

SEQ ID NO: 5892 - DNA, 145 bp, synthetic construct
  source 1..145: mol_type = other DNA
aagtgctgagtcagcagtttacgctaagtgctgagtcagcagtttgccgctaagtgctgagtcagcagtttgctttaagtgctgagtcagcagtttgatctaagtgctgagtcagcagtttacgctaagtgctgagtcagcagtt

SEQ ID NO: 5893 - DNA, 145 bp, synthetic construct
  source 1..145: mol_type = other DNA
aactgctgactcagcactttacgctaactgctgactcagcactttgccgctaactgctgactcagcactttgctttaactgctgactcagcactttgatctaactgctgactcagcactttacgctaactgctgactcagcactt

SEQ ID NO: 5894 - DNA, 145 bp, synthetic construct
  source 1..145: mol_type = other DNA
aagtgctgactcagcagaatacgctaagtgctgactcagcagaatgccgctaagtgctgactcagcagaatgctttaagtgctgactcagcagaatgatctaagtgctgactcagcagaatacgctaagtgctgactcagcagaa

SEQ ID NO: 5895 - DNA, 145 bp, synthetic construct
  source 1..145: mol_type = other DNA
ttctgctgagtcagcactttacgctttctgctgagtcagcactttgccgctttctgctgagtcagcactttgctttttctgctgagtcagcactttgatctttctgctgagtcagcactttacgctttctgctgagtcagcactt

SEQ ID NO: 5896 - DNA, 145 bp, synthetic construct
  source 1..145: mol_type = other DNA
aagtgctgactcagcagattacgctaagtgctgactcagcagattgccgctaagtgctgactcagcagattgctttaagtgctgactcagcagattgatctaagtgctgactcagcagattacgctaagtgctgactcagcagat

SEQ ID NO: 5897 - DNA, 145 bp, synthetic construct
  source 1..145: mol_type = other DNA
atctgctgagtcagcactttacgctatctgctgagtcagcactttgccgctatctgctgagtcagcactttgctttatctgctgagtcagcactttgatctatctgctgagtcagcactttacgctatctgctgagtcagcactt

SEQ ID NO: 5898 - DNA, 145 bp, synthetic construct
  source 1..145: mol_type = other DNA
aagtgctgactcagcagtatacgctaagtgctgactcagcagtatgccgctaagtgctgactcagcagtatgctttaagtgctgactcagcagtatgatctaagtgctgactcagcagtatacgctaagtgctgactcagcagta

SEQ ID NO: 5899 - DNA, 145 bp, synthetic construct
  source 1..145: mol_type = other DNA
tactgctgagtcagcactttacgcttactgctgagtcagcactttgccgcttactgctgagtcagcactttgcttttactgctgagtcagcactttgatcttactgctgagtcagcactttacgcttactgctgagtcagcactt

SEQ ID NO: 5900 - DNA, 145 bp, synthetic construct
  source 1..145: mol_type = other DNA
aagtgctgactcagcagtttacgctaagtgctgactcagcagtttgccgctaagtgctgactcagcagtttgctttaagtgctgactcagcagtttgatctaagtgctgactcagcagtttacgctaagtgctgactcagcagtt

SEQ ID NO: 5901 - DNA, 145 bp, synthetic construct
  source 1..145: mol_type = other DNA
aactgctgagtcagcactttacgctaactgctgagtcagcactttgccgctaactgctgagtcagcactttgctttaactgctgagtcagcactttgatctaactgctgagtcagcactttacgctaactgctgagtcagcactt

SEQ ID NO: 5902 - DNA, 145 bp, synthetic construct
  source 1..145: mol_type = other DNA
atgtgctgagtcagcagaatacgctatgtgctgagtcagcagaatgccgctatgtgctgagtcagcagaatgctttatgtgctgagtcagcagaatgatctatgtgctgagtcagcagaatacgctatgtgctgagtcagcagaa

SEQ ID NO: 5903 - DNA, 145 bp, synthetic construct
  source 1..145: mol_type = other DNA
ttctgctgactcagcacattacgctttctgctgactcagcacattgccgctttctgctgactcagcacattgctttttctgctgactcagcacattgatctttctgctgactcagcacattacgctttctgctgactcagcacat

SEQ ID NO: 5904 - DNA, 145 bp, synthetic construct
  source 1..145: mol_type = other DNA
atgtgctgagtcagcagattacgctatgtgctgagtcagcagattgccgctatgtgctgagtcagcagattgctttatgtgctgagtcagcagattgatctatgtgctgagtcagcagattacgctatgtgctgagtcagcagat

SEQ ID NO: 5905 - DNA, 145 bp, synthetic construct
  source 1..145: mol_type = other DNA
atctgctgactcagcacattacgctatctgctgactcagcacattgccgctatctgctgactcagcacattgctttatctgctgactcagcacattgatctatctgctgactcagcacattacgctatctgctgactcagcacat

SEQ ID NO: 5906 - DNA, 145 bp, synthetic construct
  source 1..145: mol_type = other DNA
atgtgctgagtcagcagtatacgctatgtgctgagtcagcagtatgccgctatgtgctgagtcagcagtatgctttatgtgctgagtcagcagtatgatctatgtgctgagtcagcagtatacgctatgtgctgagtcagcagta

SEQ ID NO: 5907 - DNA, 145 bp, synthetic construct
  source 1..145: mol_type = other DNA
tactgctgactcagcacattacgcttactgctgactcagcacattgccgcttactgctgactcagcacattgcttttactgctgactcagcacattgatcttactgctgactcagcacattacgcttactgctgactcagcacat

SEQ ID NO: 5908 - DNA, 145 bp, synthetic construct
  source 1..145: mol_type = other DNA
atgtgctgagtcagcagtttacgctatgtgctgagtcagcagtttgccgctatgtgctgagtcagcagtttgctttatgtgctgagtcagcagtttgatctatgtgctgagtcagcagtttacgctatgtgctgagtcagcagtt

SEQ ID NO: 5909 - DNA, 145 bp, synthetic construct
  source 1..145: mol_type = other DNA
aactgctgactcagcacattacgctaactgctgactcagcacattgccgctaactgctgactcagcacattgctttaactgctgactcagcacattgatctaactgctgactcagcacattacgctaactgctgactcagcacat

SEQ ID NO: 5910 - DNA, 145 bp, synthetic construct
  source 1..145: mol_type = other DNA
atgtgctgactcagcagaatacgctatgtgctgactcagcagaatgccgctatgtgctgactcagcagaatgctttatgtgctgactcagcagaatgatctatgtgctgactcagcagaatacgctatgtgctgactcagcagaa

SEQ ID NO: 5911 - DNA, 145 bp, synthetic construct
  source 1..145: mol_type = other DNA
ttctgctgagtcagcacattacgctttctgctgagtcagcacattgccgctttctgctgagtcagcacattgctttttctgctgagtcagcacattgatctttctgctgagtcagcacattacgctttctgctgagtcagcacat

SEQ ID NO: 5912 - DNA, 145 bp, synthetic construct
  source 1..145: mol_type = other DNA
atgtgctgactcagcagattacgctatgtgctgactcagcagattgccgctatgtgctgactcagcagattgctttatgtgctgactcagcagattgatctatgtgctgactcagcagattacgctatgtgctgactcagcagat

SEQ ID NO: 5913 - DNA, 145 bp, synthetic construct
  source 1..145: mol_type = other DNA
atctgctgagtcagcacattacgctatctgctgagtcagcacattgccgctatctgctgagtcagcacattgctttatctgctgagtcagcacattgatctatctgctgagtcagcacattacgctatctgctgagtcagcacat

SEQ ID NO: 5914 - DNA, 145 bp, synthetic construct
  source 1..145: mol_type = other DNA
atgtgctgactcagcagtatacgctatgtgctgactcagcagtatgccgctatgtgctgactcagcagtatgctttatgtgctgactcagcagtatgatctatgtgctgactcagcagtatacgctatgtgctgactcagcagta

SEQ ID NO: 5915 - DNA, 145 bp, synthetic construct
  source 1..145: mol_type = other DNA
tactgctgagtcagcacattacgcttactgctgagtcagcacattgccgcttactgctgagtcagcacattgcttttactgctgagtcagcacattgatcttactgctgagtcagcacattacgcttactgctgagtcagcacat

SEQ ID NO: 5916 - DNA, 145 bp, synthetic construct
  source 1..145: mol_type = other DNA
atgtgctgactcagcagtttacgctatgtgctgactcagcagtttgccgctatgtgctgactcagcagtttgctttatgtgctgactcagcagtttgatctatgtgctgactcagcagtttacgctatgtgctgactcagcagtt

SEQ ID NO: 5917 - DNA, 145 bp, synthetic construct
  source 1..145: mol_type = other DNA
aactgctgagtcagcacattacgctaactgctgagtcagcacattgccgctaactgctgagtcagcacattgctttaactgctgagtcagcacattgatctaactgctgagtcagcacattacgctaactgctgagtcagcacat

SEQ ID NO: 5918 - DNA, 145 bp, synthetic construct
  source 1..145: mol_type = other DNA
tagtgctgagtcagcagaatacgcttagtgctgagtcagcagaatgccgcttagtgctgagtcagcagaatgcttttagtgctgagtcagcagaatgatcttagtgctgagtcagcagaatacgcttagtgctgagtcagcagaa

SEQ ID NO: 5919 - DNA, 145 bp, synthetic construct
  source 1..145: mol_type = other DNA
ttctgctgactcagcactatacgctttctgctgactcagcactatgccgctttctgctgactcagcactatgctttttctgctgactcagcactatgatctttctgctgactcagcactatacgctttctgctgactcagcacta

SEQ ID NO: 5920 - DNA, 145 bp, synthetic construct
  source 1..145: mol_type = other DNA
tagtgctgagtcagcagattacgcttagtgctgagtcagcagattgccgcttagtgctgagtcagcagattgcttttagtgctgagtcagcagattgatcttagtgctgagtcagcagattacgcttagtgctgagtcagcagat

SEQ ID NO: 5921 - DNA, 145 bp, synthetic construct
  source 1..145: mol_type = other DNA
atctgctgactcagcactatacgctatctgctgactcagcactatgccgctatctgctgactcagcactatgctttatctgctgactcagcactatgatctatctgctgactcagcactatacgctatctgctgactcagcacta

SEQ ID NO: 5922 - DNA, 145 bp, synthetic construct
  source 1..145: mol_type = other DNA
tagtgctgagtcagcagtatacgcttagtgctgagtcagcagtatgccgcttagtgctgagtcagcagtatgcttttagtgctgagtcagcagtatgatcttagtgctgagtcagcagtatacgcttagtgctgagtcagcagta

SEQ ID NO: 5923 - DNA, 145 bp, synthetic construct
  source 1..145: mol_type = other DNA
tactgctgactcagcactatacgcttactgctgactcagcactatgccgcttactgctgactcagcactatgcttttactgctgactcagcactatgatcttactgctgactcagcactatacgcttactgctgactcagcacta

SEQ ID NO: 5924 - DNA, 145 bp, synthetic construct
  source 1..145: mol_type = other DNA
tagtgctgagtcagcagtttacgcttagtgctgagtcagcagtttgccgcttagtgctgagtcagcagtttgcttttagtgctgagtcagcagtttgatcttagtgctgagtcagcagtttacgcttagtgctgagtcagcagtt

SEQ ID NO: 5925 - DNA, 145 bp, synthetic construct
  source 1..145: mol_type = other DNA
aactgctgactcagcactatacgctaactgctgactcagcactatgccgctaactgctgactcagcactatgctttaactgctgactcagcactatgatctaactgctgactcagcactatacgctaactgctgactcagcacta

SEQ ID NO: 5926 - DNA, 145 bp, synthetic construct
  source 1..145: mol_type = other DNA
tagtgctgactcagcagaatacgcttagtgctgactcagcagaatgccgcttagtgctgactcagcagaatgcttttagtgctgactcagcagaatgatcttagtgctgactcagcagaatacgcttagtgctgactcagcagaa

SEQ ID NO: 5927 - DNA, 145 bp, synthetic construct
  source 1..145: mol_type = other DNA
ttctgctgagtcagcactatacgctttctgctgagtcagcactatgccgctttctgctgagtcagcactatgctttttctgctgagtcagcactatgatctttctgctgagtcagcactatacgctttctgctgagtcagcacta

SEQ ID NO: 5928 - DNA, 145 bp, synthetic construct
  source 1..145: mol_type = other DNA
tagtgctgactcagcagattacgcttagtgctgactcagcagattgccgcttagtgctgactcagcagattgcttttagtgctgactcagcagattgatcttagtgctgactcagcagattacgcttagtgctgactcagcagat

SEQ ID NO: 5929 - DNA, 145 bp, synthetic construct
  source 1..145: mol_type = other DNA
atctgctgagtcagcactatacgctatctgctgagtcagcactatgccgctatctgctgagtcagcactatgctttatctgctgagtcagcactatgatctatctgctgagtcagcactatacgctatctgctgagtcagcacta

SEQ ID NO: 5930 - DNA, 145 bp, synthetic construct
  source 1..145: mol_type = other DNA
tagtgctgactcagcagtatacgcttagtgctgactcagcagtatgccgcttagtgctgactcagcagtatgcttttagtgctgactcagcagtatgatcttagtgctgactcagcagtatacgcttagtgctgactcagcagta

SEQ ID NO: 5931 - DNA, 145 bp, synthetic construct
  source 1..145: mol_type = other DNA
tactgctgagtcagcactatacgcttactgctgagtcagcactatgccgcttactgctgagtcagcactatgcttttactgctgagtcagcactatgatcttactgctgagtcagcactatacgcttactgctgagtcagcacta

SEQ ID NO: 5932 - DNA, 145 bp, synthetic construct
  source 1..145: mol_type = other DNA
tagtgctgactcagcagtttacgcttagtgctgactcagcagtttgccgcttagtgctgactcagcagtttgcttttagtgctgactcagcagtttgatcttagtgctgactcagcagtttacgcttagtgctgactcagcagtt

SEQ ID NO: 5933 - DNA, 145 bp, synthetic construct
  source 1..145: mol_type = other DNA
aactgctgagtcagcactatacgctaactgctgagtcagcactatgccgctaactgctgagtcagcactatgctttaactgctgagtcagcactatgatctaactgctgagtcagcactatacgctaactgctgagtcagcacta

SEQ ID NO: 5934 - DNA, 145 bp, synthetic construct
  source 1..145: mol_type = other DNA
ttgtgctgagtcagcagaatacgctttgtgctgagtcagcagaatgccgctttgtgctgagtcagcagaatgctttttgtgctgagtcagcagaatgatctttgtgctgagtcagcagaatacgctttgtgctgagtcagcagaa

SEQ ID NO: 5935 - DNA, 145 bp, synthetic construct
  source 1..145: mol_type = other DNA
ttctgctgactcagcacaatacgctttctgctgactcagcacaatgccgctttctgctgactcagcacaatgctttttctgctgactcagcacaatgatctttctgctgactcagcacaatacgctttctgctgactcagcacaa

SEQ ID NO: 5936 - DNA, 145 bp, synthetic construct
  source 1..145: mol_type = other DNA
ttgtgctgagtcagcagattacgctttgtgctgagtcagcagattgccgctttgtgctgagtcagcagattgctttttgtgctgagtcagcagattgatctttgtgctgagtcagcagattacgctttgtgctgagtcagcagat

SEQ ID NO: 5937 - DNA, 145 bp, synthetic construct
  source 1..145: mol_type = other DNA
atctgctgactcagcacaatacgctatctgctgactcagcacaatgccgctatctgctgactcagcacaatgctttatctgctgactcagcacaatgatctatctgctgactcagcacaatacgctatctgctgactcagcacaa

SEQ ID NO: 5938 - DNA, 145 bp, synthetic construct
  source 1..145: mol_type = other DNA
ttgtgctgagtcagcagtatacgctttgtgctgagtcagcagtatgccgctttgtgctgagtcagcagtatgctttttgtgctgagtcagcagtatgatctttgtgctgagtcagcagtatacgctttgtgctgagtcagcagta

SEQ ID NO: 5939 - DNA, 145 bp, synthetic construct
  source 1..145: mol_type = other DNA
tactgctgactcagcacaatacgcttactgctgactcagcacaatgccgcttactgctgactcagcacaatgcttttactgctgactcagcacaatgatcttactgctgactcagcacaatacgcttactgctgactcagcacaa

SEQ ID NO: 5940 - DNA, 145 bp, synthetic construct
  source 1..145: mol_type = other DNA
ttgtgctgagtcagcagtttacgctttgtgctgagtcagcagtttgccgctttgtgctgagtcagcagtttgctttttgtgctgagtcagcagtttgatctttgtgctgagtcagcagtttacgctttgtgctgagtcagcagtt

SEQ ID NO: 5941 - DNA, 145 bp, synthetic construct
  source 1..145: mol_type = other DNA
aactgctgactcagcacaatacgctaactgctgactcagcacaatgccgctaactgctgactcagcacaatgctttaactgctgactcagcacaatgatctaactgctgactcagcacaatacgctaactgctgactcagcacaa

SEQ ID NO: 5942 - DNA, 145 bp, synthetic construct
  source 1..145: mol_type = other DNA
ttgtgctgactcagcagaatacgctttgtgctgactcagcagaatgccgctttgtgctgactcagcagaatgctttttgtgctgactcagcagaatgatctttgtgctgactcagcagaatacgctttgtgctgactcagcagaa

SEQ ID NO: 5943 - DNA, 145 bp, synthetic construct
  source 1..145: mol_type = other DNA
ttctgctgagtcagcacaatacgctttctgctgagtcagcacaatgccgctttctgctgagtcagcacaatgctttttctgctgagtcagcacaatgatctttctgctgagtcagcacaatacgctttctgctgagtcagcacaa

SEQ ID NO: 5944 - DNA, 145 bp, synthetic construct
  source 1..145: mol_type = other DNA
ttgtgctgactcagcagattacgctttgtgctgactcagcagattgccgctttgtgctgactcagcagattgctttttgtgctgactcagcagattgatctttgtgctgactcagcagattacgctttgtgctgactcagcagat

SEQ ID NO: 5945 - DNA, 145 bp, synthetic construct
  source 1..145: mol_type = other DNA
atctgctgagtcagcacaatacgctatctgctgagtcagcacaatgccgctatctgctgagtcagcacaatgctttatctgctgagtcagcacaatgatctatctgctgagtcagcacaatacgctatctgctgagtcagcacaa

SEQ ID NO: 5946 - DNA, 145 bp, synthetic construct
  source 1..145: mol_type = other DNA
ttgtgctgactcagcagtatacgctttgtgctgactcagcagtatgccgctttgtgctgactcagcagtatgctttttgtgctgactcagcagtatgatctttgtgctgactcagcagtatacgctttgtgctgactcagcagta

SEQ ID NO: 5947 - DNA, 145 bp, synthetic construct
  source 1..145: mol_type = other DNA
tactgctgagtcagcacaatacgcttactgctgagtcagcacaatgccgcttactgctgagtcagcacaatgcttttactgctgagtcagcacaatgatcttactgctgagtcagcacaatacgcttactgctgagtcagcacaa

SEQ ID NO: 5948 - DNA, 145 bp, synthetic construct
  source 1..145: mol_type = other DNA
ttgtgctgactcagcagtttacgctttgtgctgactcagcagtttgccgctttgtgctgactcagcagtttgctttttgtgctgactcagcagtttgatctttgtgctgactcagcagtttacgctttgtgctgactcagcagtt

SEQ ID NO: 5949 - DNA, 145 bp, synthetic construct
  source 1..145: mol_type = other DNA
aactgctgagtcagcacaatacgctaactgctgagtcagcacaatgccgctaactgctgagtcagcacaatgctttaactgctgagtcagcacaatgatctaactgctgagtcagcacaatacgctaactgctgagtcagcacaa

SEQ ID NO: 5950 - DNA, 140 bp, synthetic construct
  source 1..140: mol_type = other DNA
tgctgactcatgccgcttgctgactcatgcttttgctgactcatgatcttgctgactcatacgcttgctgactcatgccgcttgctgactcatgcttttgctgactcatgatcttgctgactcatacgcttgctgactca

SEQ ID NO: 5951 - DNA, 140 bp, synthetic construct
  source 1..140: mol_type = other DNA
tgagtcagcatgccgcttgagtcagcatgcttttgagtcagcatgatcttgagtcagcatacgcttgagtcagcatgccgcttgagtcagcatgcttttgagtcagcatgatcttgagtcagcatacgcttgagtcagca

SEQ ID NO: 5952 - DNA, 149 bp, synthetic construct
  source 1..149: mol_type = other DNA
gatgacgtcactgccgctgatgacgtcactgctttgatgacgtcactgatctgatgacgtcactacgctgatgacgtcactgccgctgatgacgtcactgctttgatgacgtcactgatctgatgacgtcactacgctgatgacgtcac

SEQ ID NO: 5953 - DNA, 149 bp, synthetic construct
  source 1..149: mol_type = other DNA
gtgacgtcatctgccgctgtgacgtcatctgctttgtgacgtcatctgatctgtgacgtcatctacgctgtgacgtcatctgccgctgtgacgtcatctgctttgtgacgtcatctgatctgtgacgtcatctacgctgtgacgtcatc

SEQ ID NO: 5954 - DNA, 149 bp, synthetic construct
  source 1..149: mol_type = other DNA
gatgacgtcattgccgctgatgacgtcattgctttgatgacgtcattgatctgatgacgtcattacgctgatgacgtcattgccgctgatgacgtcattgctttgatgacgtcattgatctgatgacgtcattacgctgatgacgtcat

SEQ ID NO: 5955 - DNA, 149 bp, synthetic construct
  source 1..149: mol_type = other DNA
atgacgtcatctgccgctatgacgtcatctgctttatgacgtcatctgatctatgacgtcatctacgctatgacgtcatctgccgctatgacgtcatctgctttatgacgtcatctgatctatgacgtcatctacgctatgacgtcatc

SEQ ID NO: 5956 - DNA, 149 bp, synthetic construct
  source 1..149: mol_type = other DNA
ggtgacgtcactgccgctggtgacgtcactgctttggtgacgtcactgatctggtgacgtcactacgctggtgacgtcactgccgctggtgacgtcactgctttggtgacgtcactgatctggtgacgtcactacgctggtgacgtcac

SEQ ID NO: 5957 - DNA, 149 bp, synthetic construct
  source 1..149: mol_type = other DNA
gtgacgtcacctgccgctgtgacgtcacctgctttgtgacgtcacctgatctgtgacgtcacctacgctgtgacgtcacctgccgctgtgacgtcacctgctttgtgacgtcacctgatctgtgacgtcacctacgctgtgacgtcacc

SEQ ID NO: 5958 - DNA, 149 bp, synthetic construct
  source 1..149: mol_type = other DNA
ggtgacgtcattgccgctggtgacgtcattgctttggtgacgtcattgatctggtgacgtcattacgctggtgacgtcattgccgctggtgacgtcattgctttggtgacgtcattgatctggtgacgtcattacgctggtgacgtcat

SEQ ID NO: 5959 - DNA, 149 bp, synthetic construct
  source 1..149: mol_type = other DNA
atgacgtcacctgccgctatgacgtcacctgctttatgacgtcacctgatctatgacgtcacctacgctatgacgtcacctgccgctatgacgtcacctgctttatgacgtcacctgatctatgacgtcacctacgctatgacgtcacc

SEQ ID NO: 5960 - DNA, 140 bp, synthetic construct; identical to SEQ ID NO: 5508
  source 1..140: mol_type = other DNA

SEQ ID NO: 5961 - DNA, 140 bp, synthetic construct; identical to SEQ ID NO: 5509
  source 1..140: mol_type = other DNA

SEQ ID NO: 5962 - DNA, 139 bp, synthetic construct
  source 1..139: mol_type = other DNA
aggtctctaacctgctttaggtctctaacctgatctaggtctctaacctacgctaggtctctaacctgccgctaggtctctaacctgctttaggtctctaacctgatctaggtctctaacctacgctaggtctctaacc

SEQ ID NO: 5963 - DNA, 139 bp, synthetic construct
  source 1..139: mol_type = other DNA
ggttagagaccttgctttggttagagaccttgatctggttagagaccttacgctggttagagaccttgccgctggttagagaccttgctttggttagagaccttgatctggttagagaccttacgctggttagagacct

SEQ ID NO: 5964 - DNA, 139 bp, synthetic construct
  source 1..139: mol_type = other DNA
aaggtcatgatctaaggtcatacgctaaggtcatgccgctaaggtcatgctttaaggtcatgatctaaggtcatacgctaaggtcatgccgctaaggtcatgctttaaggtcatgatctaaggtcatacgctaaggtca

SEQ ID NO: 5965 - DNA, 139 bp, synthetic construct
  source 1..139: mol_type = other DNA
tgacctttgatcttgacctttacgcttgacctttgccgcttgacctttgcttttgacctttgatcttgacctttacgcttgacctttgccgcttgacctttgcttttgacctttgatcttgacctttacgcttgacctt

SEQ ID NO: 5966 - DNA, 139 bp, synthetic construct
  source 1..139: mol_type = other DNA
agggtcatgatctagggtcatacgctagggtcatgccgctagggtcatgctttagggtcatgatctagggtcatacgctagggtcatgccgctagggtcatgctttagggtcatgatctagggtcatacgctagggtca

SEQ ID NO: 5967 - DNA, 139 bp, synthetic construct
  source 1..139: mol_type = other DNA
tgacccttgatcttgacccttacgcttgacccttgccgcttgacccttgcttttgacccttgatcttgacccttacgcttgacccttgccgcttgacccttgcttttgacccttgatcttgacccttacgcttgaccct

SEQ ID NO: 5968 - DNA, 139 bp, synthetic construct
  source 1..139: mol_type = other DNA
gaggtcatgatctgaggtcatacgctgaggtcatgccgctgaggtcatgctttgaggtcatgatctgaggtcatacgctgaggtcatgccgctgaggtcatgctttgaggtcatgatctgaggtcatacgctgaggtca

SEQ ID NO: 5969 - DNA, 139 bp, synthetic construct
  source 1..139: mol_type = other DNA
tgacctctgatcttgacctctacgcttgacctctgccgcttgacctctgcttttgacctctgatcttgacctctacgcttgacctctgccgcttgacctctgcttttgacctctgatcttgacctctacgcttgacctc

SEQ ID NO: 5970 - DNA, 139 bp, synthetic construct
  source 1..139: mol_type = other DNA
ggggtcatgatctggggtcatacgctggggtcatgccgctggggtcatgctttggggtcatgatctggggtcatacgctggggtcatgccgctggggtcatgctttggggtcatgatctggggtcatacgctggggtca

SEQ ID NO: 5971 - DNA, 139 bp, synthetic construct
  source 1..139: mol_type = other DNA
tgacccctgatcttgacccctacgcttgacccctgccgcttgacccctgcttttgacccctgatcttgacccctacgcttgacccctgccgcttgacccctgcttttgacccctgatcttgacccctacgcttgacccc

SEQ ID NO: 5972 - DNA, 125 bp, synthetic construct
  source 1..125: mol_type = other DNA
cggcccttttatgaccaggctgccgctcggcccttttatgaccaggctgctttcggcccttttatgaccaggctgatctcggcccttttatgaccaggctacgctcggcccttttatgaccaggc

SEQ ID NO: 5973 - DNA, 125 bp, synthetic construct
  source 1..125: mol_type = other DNA
gcctggtcataaaagggccgtgccgctgcctggtcataaaagggccgtgctttgcctggtcataaaagggccgtgatctgcctggtcataaaagggccgtacgctgcctggtcataaaagggccg

SEQ ID NO: 5974 - DNA, 125 bp, synthetic construct
  source 1..125: mol_type = other DNA
cggcccttttttgaccaggctgccgctcggcccttttttgaccaggctgctttcggcccttttttgaccaggctgatctcggcccttttttgaccaggctacgctcggcccttttttgaccaggc

SEQ ID NO: 5975 - DNA, 125 bp, synthetic construct
  source 1..125: mol_type = other DNA
gcctggtcaaaaaagggccgtgccgctgcctggtcaaaaaagggccgtgctttgcctggtcaaaaaagggccgtgatctgcctggtcaaaaaagggccgtacgctgcctggtcaaaaaagggccg

SEQ ID NO: 5976 - DNA, 125 bp, synthetic construct
  source 1..125: mol_type = other DNA
cggcctttttatgaccaggctgccgctcggcctttttatgaccaggctgctttcggcctttttatgaccaggctgatctcggcctttttatgaccaggctacgctcggcctttttatgaccaggc

SEQ ID NO: 5977 - DNA, 125 bp, synthetic construct
  source 1..125: mol_type = other DNA
gcctggtcataaaaaggccgtgccgctgcctggtcataaaaaggccgtgctttgcctggtcataaaaaggccgtgatctgcctggtcataaaaaggccgtacgctgcctggtcataaaaaggccg

SEQ ID NO: 5978 - DNA, 125 bp, synthetic construct
  source 1..125: mol_type = other DNA
cggcctttttttgaccaggctgccgctcggcctttttttgaccaggctgctttcggcctttttttgaccaggctgatctcggcctttttttgaccaggctacgctcggcctttttttgaccaggc

SEQ ID NO: 5979 - DNA, 125 bp, synthetic construct
  source 1..125: mol_type = other DNA
gcctggtcaaaaaaaggccgtgccgctgcctggtcaaaaaaaggccgtgctttgcctggtcaaaaaaaggccgtgatctgcctggtcaaaaaaaggccgtacgctgcctggtcaaaaaaaggccg

SEQ ID NO: 5980 - DNA, 125 bp, synthetic construct
  source 1..125: mol_type = other DNA
cggctcttttatgaccaggctgccgctcggctcttttatgaccaggctgctttcggctcttttatgaccaggctgatctcggctcttttatgaccaggctacgctcggctcttttatgaccaggc

SEQ ID NO: 5981 - DNA, 125 bp, synthetic construct
  source 1..125: mol_type = other DNA
gcctggtcataaaagagccgtgccgctgcctggtcataaaagagccgtgctttgcctggtcataaaagagccgtgatctgcctggtcataaaagagccgtacgctgcctggtcataaaagagccg

SEQ ID NO: 5982 - DNA, 125 bp, synthetic construct
  source 1..125: mol_type = other DNA
cggctcttttttgaccaggctgccgctcggctcttttttgaccaggctgctttcggctcttttttgaccaggctgatctcggctcttttttgaccaggctacgctcggctcttttttgaccaggc

SEQ ID NO: 5983 - DNA, 125 bp, synthetic construct
  source 1..125: mol_type = other DNA
gcctggtcaaaaaagagccgtgccgctgcctggtcaaaaaagagccgtgctttgcctggtcaaaaaagagccgtgatctgcctggtcaaaaaagagccgtacgctgcctggtcaaaaaagagccg

SEQ ID NO: 5984 - DNA, 125 bp, synthetic construct
  source 1..125: mol_type = other DNA
cggcttttttatgaccaggctgccgctcggcttttttatgaccaggctgctttcggcttttttatgaccaggctgatctcggcttttttatgaccaggctacgctcggcttttttatgaccaggc

SEQ ID NO: 5985 - DNA, 125 bp, synthetic construct
  source 1..125: mol_type = other DNA
gcctggtcataaaaaagccgtgccgctgcctggtcataaaaaagccgtgctttgcctggtcataaaaaagccgtgatctgcctggtcataaaaaagccgtacgctgcctggtcataaaaaagccg

SEQ ID NO: 5986 - DNA, 125 bp, synthetic construct
  source 1..125: mol_type = other DNA
cggcttttttttgaccaggctgccgctcggcttttttttgaccaggctgctttcggcttttttttgaccaggctgatctcggcttttttttgaccaggctacgctcggcttttttttgaccaggc

SEQ ID NO: 5987 - DNA, 125 bp, synthetic construct
  source 1..125: mol_type = other DNA
gcctggtcaaaaaaaagccgtgccgctgcctggtcaaaaaaaagccgtgctttgcctggtcaaaaaaaagccgtgatctgcctggtcaaaaaaaagccgtacgctgcctggtcaaaaaaaagccg

SEQ ID NO: 5988 - DNA, 139 bp, synthetic construct
  source 1..139: mol_type = other DNA
gtgcgcatgcgctgctttgtgcgcatgcgctgatctgtgcgcatgcgctacgctgtgcgcatgcgctgccgctgtgcgcatgcgctgctttgtgcgcatgcgctgatctgtgcgcatgcgctacgctgtgcgcatgcgc

SEQ ID NO: 5989 - DNA, 139 bp, synthetic construct
  source 1..139: mol_type = other DNA
gcgcatgcgcactgctttgcgcatgcgcactgatctgcgcatgcgcactacgctgcgcatgcgcactgccgctgcgcatgcgcactgctttgcgcatgcgcactgatctgcgcatgcgcactacgctgcgcatgcgcac

SEQ ID NO: 5990 - DNA, 140 bp, synthetic construct; identical to SEQ ID NO: 5558
  source 1..140: mol_type = other DNA

SEQ ID NO: 5991 - DNA, 140 bp, synthetic construct; identical to SEQ ID NO: 5559
  source 1..140: mol_type = other DNA

SEQ ID NO: 5992 - DNA, 140 bp, synthetic construct; identical to SEQ ID NO: 5560
  source 1..140: mol_type = other DNA

SEQ ID NO: 5993 - DNA, 140 bp, synthetic construct; identical to SEQ ID NO: 5560
  source 1..140: mol_type = other DNA

SEQ ID NO: 5994 - DNA, 140 bp, synthetic construct
  source 1..140: mol_type = other DNA
gtgacgtcactgccgctgtgacgtcactgctttgtgacgtcactgatctgtgacgtcactacgctgtgacgtcactgccgctgtgacgtcactgctttgtgacgtcactgatctgtgacgtcactacgctgtgacgtcac

SEQ ID NO: 5995 - DNA, 140 bp, synthetic construct; identical to SEQ ID NO: 5994
  source 1..140: mol_type = other DNA

SEQ ID NO: 5996 - DNA, 140 bp, synthetic construct; identical to SEQ ID NO: 5559
  source 1..140: mol_type = other DNA

SEQ ID NO: 5997 - DNA, 140 bp, synthetic construct; identical to SEQ ID NO: 5558
  source 1..140: mol_type = other DNA

SEQ ID NO: 5998 - DNA, 139 bp, synthetic construct
  source 1..139: mol_type = other DNA
gatgactcagcatgctttgatgactcagcatgatctgatgactcagcatacgctgatgactcagcatgccgctgatgactcagcatgctttgatgactcagcatgatctgatgactcagcatacgctgatgactcagca

SEQ ID NO: 5999 - DNA, 139 bp, synthetic construct
  source 1..139: mol_type = other DNA
tgctgagtcatctgcttttgctgagtcatctgatcttgctgagtcatctacgcttgctgagtcatctgccgcttgctgagtcatctgcttttgctgagtcatctgatcttgctgagtcatctacgcttgctgagtcatc

SEQ ID NO: 6000 - DNA, 136 bp, synthetic construct
  source 1..136: mol_type = other DNA
ggcagttatacgctggcagttatgccgctggcagttatgctttggcagttatgatctggcagttatacgctggcagttatgccgctggcagttatgctttggcagttatgatctggcagttatacgctggcagtta

SEQ ID NO: 6001 - DNA, 136 bp, synthetic construct
  source 1..136: mol_type = other DNA
taactgcctacgcttaactgcctgccgcttaactgcctgcttttaactgcctgatcttaactgcctacgcttaactgcctgccgcttaactgcctgcttttaactgcctgatcttaactgcctacgcttaactgcc

SEQ ID NO: 6002 - DNA, 136 bp, synthetic construct
  source 1..136: mol_type = other DNA
ggcagttgtacgctggcagttgtgccgctggcagttgtgctttggcagttgtgatctggcagttgtacgctggcagttgtgccgctggcagttgtgctttggcagttgtgatctggcagttgtacgctggcagttg

SEQ ID NO: 6003 - DNA, 136 bp, synthetic construct
  source 1..136: mol_type = other DNA
caactgcctacgctcaactgcctgccgctcaactgcctgctttcaactgcctgatctcaactgcctacgctcaactgcctgccgctcaactgcctgctttcaactgcctgatctcaactgcctacgctcaactgcc

SEQ ID NO: 6004 - DNA, 136 bp, synthetic construct
  source 1..136: mol_type = other DNA
ggccgttatacgctggccgttatgccgctggccgttatgctttggccgttatgatctggccgttatacgctggccgttatgccgctggccgttatgctttggccgttatgatctggccgttatacgctggccgtta

SEQ ID NO: 6005 - DNA, 136 bp, synthetic construct
  source 1..136: mol_type = other DNA
taacggcctacgcttaacggcctgccgcttaacggcctgcttttaacggcctgatcttaacggcctacgcttaacggcctgccgcttaacggcctgcttttaacggcctgatcttaacggcctacgcttaacggcc

SEQ ID NO: 6006 - DNA, 136 bp, synthetic construct
  source 1..136: mol_type = other DNA
ggccgttgtacgctggccgttgtgccgctggccgttgtgctttggccgttgtgatctggccgttgtacgctggccgttgtgccgctggccgttgtgctttggccgttgtgatctggccgttgtacgctggccgttg

SEQ ID NO: 6007 - DNA, 136 bp, synthetic construct
  source 1..136: mol_type = other DNA
caacggcctacgctcaacggcctgccgctcaacggcctgctttcaacggcctgatctcaacggcctacgctcaacggcctgccgctcaacggcctgctttcaacggcctgatctcaacggcctacgctcaacggcc

SEQ ID NO: 6008 - DNA, 136 bp, synthetic construct
  source 1..136: mol_type = other DNA
ggcggttatacgctggcggttatgccgctggcggttatgctttggcggttatgatctggcggttatacgctggcggttatgccgctggcggttatgctttggcggttatgatctggcggttatacgctggcggtta

SEQ ID NO: 6009 - DNA, 136 bp, synthetic construct
  source 1..136: mol_type = other DNA
taaccgcctacgcttaaccgcctgccgcttaaccgcctgcttttaaccgcctgatcttaaccgcctacgcttaaccgcctgccgcttaaccgcctgcttttaaccgcctgatcttaaccgcctacgcttaaccgcc

SEQ ID NO: 6010 - DNA, 136 bp, synthetic construct
  source 1..136: mol_type = other DNA
ggcggttgtacgctggcggttgtgccgctggcggttgtgctttggcggttgtgatctggcggttgtacgctggcggttgtgccgctggcggttgtgctttggcggttgtgatctggcggttgtacgctggcggttg

SEQ ID NO: 6011 - DNA, 136 bp, synthetic construct
  source 1..136: mol_type = other DNA
caaccgcctacgctcaaccgcctgccgctcaaccgcctgctttcaaccgcctgatctcaaccgcctacgctcaaccgcctgccgctcaaccgcctgctttcaaccgcctgatctcaaccgcctacgctcaaccgcc

SEQ ID NO: 6012 - DNA, 139 bp, synthetic construct
  source 1..139: mol_type = other DNA
gtgccattgagacagcactacgctgtgccattgagacagcactgccgctgtgccattgagacagcactgctttgtgccattgagacagcactgatctgtgccattgagacagcactacgctgtgccattgagacagcac

SEQ ID NO: 6013 - DNA, 139 bp, synthetic construct
  source 1..139: mol_type = other DNA
gtgctgtctcaatggcactacgctgtgctgtctcaatggcactgccgctgtgctgtctcaatggcactgctttgtgctgtctcaatggcactgatctgtgctgtctcaatggcactacgctgtgctgtctcaatggcac

SEQ ID NO: 6014 - DNA, 139 bp, synthetic construct
  source 1..139: mol_type = other DNA
gtgccattgagatagcactacgctgtgccattgagatagcactgccgctgtgccattgagatagcactgctttgtgccattgagatagcactgatctgtgccattgagatagcactacgctgtgccattgagatagcac

SEQ ID NO: 6015 - DNA, 139 bp, synthetic construct
  source 1..139: mol_type = other DNA
gtgctatctcaatggcactacgctgtgctatctcaatggcactgccgctgtgctatctcaatggcactgctttgtgctatctcaatggcactgatctgtgctatctcaatggcactacgctgtgctatctcaatggcac

SEQ ID NO: 6016 - DNA, 135 bp, synthetic construct
  source 1..135: mol_type = other DNA
atgactcagcataatgatctatgactcagcataatacgctatgactcagcataatgccgctatgactcagcataatgctttatgactcagcataatgatctatgactcagcataatacgctatgactcagcataa

SEQ ID NO: 6017 - DNA, 135 bp, synthetic construct
  source 1..135: mol_type = other DNA
ttatgctgagtcattgatctttatgctgagtcattacgctttatgctgagtcattgccgctttatgctgagtcattgctttttatgctgagtcattgatctttatgctgagtcattacgctttatgctgagtcat

SEQ ID NO: 6018 - DNA, 135 bp, synthetic construct
  source 1..135: mol_type = other DNA
atgactcagcatattgatctatgactcagcatattacgctatgactcagcatattgccgctatgactcagcatattgctttatgactcagcatattgatctatgactcagcatattacgctatgactcagcatat

SEQ ID NO: 6019 - DNA, 135 bp, synthetic construct
  source 1..135: mol_type = other DNA
atatgctgagtcattgatctatatgctgagtcattacgctatatgctgagtcattgccgctatatgctgagtcattgctttatatgctgagtcattgatctatatgctgagtcattacgctatatgctgagtcat

SEQ ID NO: 6020 - DNA, 135 bp, synthetic construct
  source 1..135: mol_type = other DNA
atgactcagcattatgatctatgactcagcattatacgctatgactcagcattatgccgctatgactcagcattatgctttatgactcagcattatgatctatgactcagcattatacgctatgactcagcatta

SEQ ID NO: 6021 - DNA, 135 bp, synthetic construct
  source 1..135: mol_type = other DNA
taatgctgagtcattgatcttaatgctgagtcattacgcttaatgctgagtcattgccgcttaatgctgagtcattgcttttaatgctgagtcattgatcttaatgctgagtcattacgcttaatgctgagtcat

SEQ ID NO: 6022 - DNA, 135 bp, synthetic construct
  source 1..135: mol_type = other DNA
atgactcagcattttgatctatgactcagcattttacgctatgactcagcattttgccgctatgactcagcattttgctttatgactcagcattttgatctatgactcagcattttacgctatgactcagcattt

SEQ ID NO: 6023 - DNA, 135 bp, synthetic construct
  source 1..135: mol_type = other DNA
aaatgctgagtcattgatctaaatgctgagtcattacgctaaatgctgagtcattgccgctaaatgctgagtcattgctttaaatgctgagtcattgatctaaatgctgagtcattacgctaaatgctgagtcat

SEQ ID NO: 6024 - DNA, 125 bp, synthetic construct
  source 1..125: mol_type = other DNA
cggctgccgtggtcagataatgccgctcggctgccgtggtcagataatgctttcggctgccgtggtcagataatgatctcggctgccgtggtcagataatacgctcggctgccgtggtcagataa

SEQ ID NO: 6025 - DNA, 125 bp, synthetic construct
  source 1..125: mol_type = other DNA
ttatctgaccacggcagccgtgccgctttatctgaccacggcagccgtgctttttatctgaccacggcagccgtgatctttatctgaccacggcagccgtacgctttatctgaccacggcagccg

SEQ ID NO: 6026 - DNA, 135 bp, synthetic construct
  source 1..135: mol_type = other DNA
aaggtcaaaggtcatgatctaaggtcaaaggtcatacgctaaggtcaaaggtcatgccgctaaggtcaaaggtcatgctttaaggtcaaaggtcatgatctaaggtcaaaggtcatacgctaaggtcaaaggtca

SEQ ID NO: 6027 - DNA, 135 bp, synthetic construct
  source 1..135: mol_type = other DNA
tgacctttgacctttgatcttgacctttgacctttacgcttgacctttgacctttgccgcttgacctttgacctttgcttttgacctttgacctttgatcttgacctttgacctttacgcttgacctttgacctt

SEQ ID NO: 6028 - DNA, 135 bp, synthetic construct
  source 1..135: mol_type = other DNA
agggtcaaaggtcatgatctagggtcaaaggtcatacgctagggtcaaaggtcatgccgctagggtcaaaggtcatgctttagggtcaaaggtcatgatctagggtcaaaggtcatacgctagggtcaaaggtca

SEQ ID NO: 6029 - DNA, 135 bp, synthetic construct
  source 1..135: mol_type = other DNA
tgacctttgacccttgatcttgacctttgacccttacgcttgacctttgacccttgccgcttgacctttgacccttgcttttgacctttgacccttgatcttgacctttgacccttacgcttgacctttgaccct

SEQ ID NO: 6030 - DNA, 135 bp, synthetic construct
  source 1..135: mol_type = other DNA
gaggtcaaaggtcatgatctgaggtcaaaggtcatacgctgaggtcaaaggtcatgccgctgaggtcaaaggtcatgctttgaggtcaaaggtcatgatctgaggtcaaaggtcatacgctgaggtcaaaggtca

SEQ ID NO: 6031 - DNA, 135 bp, synthetic construct
  source 1..135: mol_type = other DNA
tgacctttgacctctgatcttgacctttgacctctacgcttgacctttgacctctgccgcttgacctttgacctctgcttttgacctttgacctctgatcttgacctttgacctctacgcttgacctttgacctc

SEQ ID NO: 6032 - DNA, 135 bp, synthetic construct
  source 1..135: mol_type = other DNA
ggggtcaaaggtcatgatctggggtcaaaggtcatacgctggggtcaaaggtcatgccgctggggtcaaaggtcatgctttggggtcaaaggtcatgatctggggtcaaaggtcatacgctggggtcaaaggtca

SEQ ID NO: 6033 - DNA, 135 bp, synthetic construct
  source 1..135: mol_type = other DNA
tgacctttgacccctgatcttgacctttgacccctacgcttgacctttgacccctgccgcttgacctttgacccctgcttttgacctttgacccctgatcttgacctttgacccctacgcttgacctttgacccc

SEQ ID NO: 6034 - DNA, 140 bp, synthetic construct
  source 1..140: mol_type = other DNA
actgaaaccatgccgctactgaaaccatgctttactgaaaccatgatctactgaaaccatacgctactgaaaccatgccgctactgaaaccatgctttactgaaaccatgatctactgaaaccatacgctactgaaacca

SEQ ID NO: 6035 - DNA, 140 bp, synthetic construct
  source 1..140: mol_type = other DNA
tggtttcagttgccgcttggtttcagttgcttttggtttcagttgatcttggtttcagttacgcttggtttcagttgccgcttggtttcagttgcttttggtttcagttgatcttggtttcagttacgcttggtttcagt

SEQ ID NO: 6036 - DNA, 149 bp, synthetic construct
  source 1..149: mol_type = other DNA
aaccggatgtatgccgctaaccggatgtatgctttaaccggatgtatgatctaaccggatgtatacgctaaccggatgtatgccgctaaccggatgtatgctttaaccggatgtatgatctaaccggatgtatacgctaaccggatgta

SEQ ID NO: 6037 - DNA, 149 bp, synthetic construct
  source 1..149: mol_type = other DNA
tacatccggtttgccgcttacatccggtttgcttttacatccggtttgatcttacatccggtttacgcttacatccggtttgccgcttacatccggtttgcttttacatccggtttgatcttacatccggtttacgcttacatccggtt

SEQ ID NO: 6038 - DNA, 149 bp, synthetic construct
  source 1..149: mol_type = other DNA
aaccggatgtttgccgctaaccggatgtttgctttaaccggatgtttgatctaaccggatgtttacgctaaccggatgtttgccgctaaccggatgtttgctttaaccggatgtttgatctaaccggatgtttacgctaaccggatgtt

SEQ ID NO: 6039 - DNA, 149 bp, synthetic construct
  source 1..149: mol_type = other DNA
aacatccggtttgccgctaacatccggtttgctttaacatccggtttgatctaacatccggtttacgctaacatccggtttgccgctaacatccggtttgctttaacatccggtttgatctaacatccggtttacgctaacatccggtt

SEQ ID NO: 6040 - DNA, 149 bp, synthetic construct
  source 1..149: mol_type = other DNA
acccggatgtatgccgctacccggatgtatgctttacccggatgtatgatctacccggatgtatacgctacccggatgtatgccgctacccggatgtatgctttacccggatgtatgatctacccggatgtatacgctacccggatgta

SEQ ID NO: 6041 - DNA, 149 bp, synthetic construct
  source 1..149: mol_type = other DNA
tacatccgggttgccgcttacatccgggttgcttttacatccgggttgatcttacatccgggttacgcttacatccgggttgccgcttacatccgggttgcttttacatccgggttgatcttacatccgggttacgcttacatccgggt

SEQ ID NO: 6042 - DNA, 149 bp, synthetic construct
  source 1..149: mol_type = other DNA
acccggatgtttgccgctacccggatgtttgctttacccggatgtttgatctacccggatgtttacgctacccggatgtttgccgctacccggatgtttgctttacccggatgtttgatctacccggatgtttacgctacccggatgtt

SEQ ID NO: 6043 - DNA, 149 bp, synthetic construct
  source 1..149: mol_type = other DNA
aacatccgggttgccgctaacatccgggttgctttaacatccgggttgatctaacatccgggttacgctaacatccgggttgccgctaacatccgggttgctttaacatccgggttgatctaacatccgggttacgctaacatccgggt

SEQ ID NO: 6044 - DNA, 133 bp, synthetic construct
  source 1..133: mol_type = other DNA
agtttcactatgactgatacgctagtttcactatgactgatgccgctagtttcactatgactgatgctttagtttcactatgactgatgatctagtttcactatgactgatacgctagtttcactatgactga

SEQ ID NO: 6045 - DNA, 133 bp, synthetic construct
  source 1..133: mol_type = other DNA
tcagtcatagtgaaacttacgcttcagtcatagtgaaacttgccgcttcagtcatagtgaaacttgcttttcagtcatagtgaaacttgatcttcagtcatagtgaaacttacgcttcagtcatagtgaaact

SEQ ID NO: 6046 - DNA, 133 bp, synthetic construct
  source 1..133: mol_type = other DNA
agtttcactatgactgttacgctagtttcactatgactgttgccgctagtttcactatgactgttgctttagtttcactatgactgttgatctagtttcactatgactgttacgctagtttcactatgactgt

SEQ ID NO: 6047 - DNA, 133 bp, synthetic construct
  source 1..133: mol_type = other DNA
acagtcatagtgaaacttacgctacagtcatagtgaaacttgccgctacagtcatagtgaaacttgctttacagtcatagtgaaacttgatctacagtcatagtgaaacttacgctacagtcatagtgaaact

SEQ ID NO: 6048 - DNA, 133 bp, synthetic construct
  source 1..133: mol_type = other DNA
agtttcactctgactgatacgctagtttcactctgactgatgccgctagtttcactctgactgatgctttagtttcactctgactgatgatctagtttcactctgactgatacgctagtttcactctgactga

SEQ ID NO: 6049 - DNA, 133 bp, synthetic construct
  source 1..133: mol_type = other DNA
tcagtcagagtgaaacttacgcttcagtcagagtgaaacttgccgcttcagtcagagtgaaacttgcttttcagtcagagtgaaacttgatcttcagtcagagtgaaacttacgcttcagtcagagtgaaact

SEQ ID NO: 6050 - DNA, 133 bp, synthetic construct
  source 1..133: mol_type = other DNA
agtttcactctgactgttacgctagtttcactctgactgttgccgctagtttcactctgactgttgctttagtttcactctgactgttgatctagtttcactctgactgttacgctagtttcactctgactgt

SEQ ID NO: 6051 - DNA, 133 bp, synthetic construct
  source 1..133: mol_type = other DNA
acagtcagagtgaaacttacgctacagtcagagtgaaacttgccgctacagtcagagtgaaacttgctttacagtcagagtgaaacttgatctacagtcagagtgaaacttacgctacagtcagagtgaaact

SEQ ID NO: 6052 - DNA, 133 bp, synthetic construct
  source 1..133: mol_type = other DNA
agtttcactttgactgatacgctagtttcactttgactgatgccgctagtttcactttgactgatgctttagtttcactttgactgatgatctagtttcactttgactgatacgctagtttcactttgactga

SEQ ID NO: 6053 - DNA, 133 bp, synthetic construct
  source 1..133: mol_type = other DNA
tcagtcaaagtgaaacttacgcttcagtcaaagtgaaacttgccgcttcagtcaaagtgaaacttgcttttcagtcaaagtgaaacttgatcttcagtcaaagtgaaacttacgcttcagtcaaagtgaaact

SEQ ID NO: 6054 - DNA, 133 bp, synthetic construct
  source 1..133: mol_type = other DNA
agtttcactttgactgttacgctagtttcactttgactgttgccgctagtttcactttgactgttgctttagtttcactttgactgttgatctagtttcactttgactgttacgctagtttcactttgactgt

SEQ ID NO: 6055 - DNA, 133 bp, synthetic construct
  source 1..133: mol_type = other DNA
acagtcaaagtgaaacttacgctacagtcaaagtgaaacttgccgctacagtcaaagtgaaacttgctttacagtcaaagtgaaacttgatctacagtcaaagtgaaacttacgctacagtcaaagtgaaact

SEQ ID NO: 6056 - DNA, 133 bp, synthetic construct
  source 1..133: mol_type = other DNA
agtttcagtatgactgatacgctagtttcagtatgactgatgccgctagtttcagtatgactgatgctttagtttcagtatgactgatgatctagtttcagtatgactgatacgctagtttcagtatgactga

SEQ ID NO: 6057 - DNA, 133 bp, synthetic construct
  source 1..133: mol_type = other DNA
tcagtcatactgaaacttacgcttcagtcatactgaaacttgccgcttcagtcatactgaaacttgcttttcagtcatactgaaacttgatcttcagtcatactgaaacttacgcttcagtcatactgaaact

SEQ ID NO: 6058 - DNA, 133 bp, synthetic construct
  source 1..133: mol_type = other DNA
agtttcagtatgactgttacgctagtttcagtatgactgttgccgctagtttcagtatgactgttgctttagtttcagtatgactgttgatctagtttcagtatgactgttacgctagtttcagtatgactgt

SEQ ID NO: 6059 - DNA, 133 bp, synthetic construct
  source 1..133: mol_type = other DNA
acagtcatactgaaacttacgctacagtcatactgaaacttgccgctacagtcatactgaaacttgctttacagtcatactgaaacttgatctacagtcatactgaaacttacgctacagtcatactgaaact

SEQ ID NO: 6060 - DNA, 133 bp, synthetic construct
  source 1..133: mol_type = other DNA
agtttcagtctgactgatacgctagtttcagtctgactgatgccgctagtttcagtctgactgatgctttagtttcagtctgactgatgatctagtttcagtctgactgatacgctagtttcagtctgactga

SEQ ID NO: 6061 - DNA, 133 bp, synthetic construct
  source 1..133: mol_type = other DNA
tcagtcagactgaaacttacgcttcagtcagactgaaacttgccgcttcagtcagactgaaacttgcttttcagtcagactgaaacttgatcttcagtcagactgaaacttacgcttcagtcagactgaaact

SEQ ID NO: 6062 - DNA, 133 bp, synthetic construct
  source 1..133: mol_type = other DNA
agtttcagtctgactgttacgctagtttcagtctgactgttgccgctagtttcagtctgactgttgctttagtttcagtctgactgttgatctagtttcagtctgactgttacgctagtttcagtctgactgt

SEQ ID NO: 6063 - DNA, 133 bp, synthetic construct
  source 1..133: mol_type = other DNA
acagtcagactgaaacttacgctacagtcagactgaaacttgccgctacagtcagactgaaacttgctttacagtcagactgaaacttgatctacagtcagactgaaacttacgctacagtcagactgaaact

SEQ ID NO: 6064 - DNA, 133 bp, synthetic construct
  source 1..133: mol_type = other DNA
agtttcagtttgactgatacgctagtttcagtttgactgatgccgctagtttcagtttgactgatgctttagtttcagtttgactgatgatctagtttcagtttgactgatacgctagtttcagtttgactga

SEQ ID NO: 6065 - DNA, 133 bp, synthetic construct
  source 1..133: mol_type = other DNA
tcagtcaaactgaaacttacgcttcagtcaaactgaaacttgccgcttcagtcaaactgaaacttgcttttcagtcaaactgaaacttgatcttcagtcaaactgaaacttacgcttcagtcaaactgaaact

SEQ ID NO: 6066 - DNA, 133 bp, synthetic construct
  source 1..133: mol_type = other DNA
agtttcagtttgactgttacgctagtttcagtttgactgttgccgctagtttcagtttgactgttgctttagtttcagtttgactgttgatctagtttcagtttgactgttacgctagtttcagtttgactgt

SEQ ID NO: 6067 - DNA, 133 bp, synthetic construct
  source 1..133: mol_type = other DNA
acagtcaaactgaaacttacgctacagtcaaactgaaacttgccgctacagtcaaactgaaacttgctttacagtcaaactgaaacttgatctacagtcaaactgaaacttacgctacagtcaaactgaaact

SEQ ID NO: 6068 - DNA, 133 bp, synthetic construct
  source 1..133: mol_type = other DNA
agtttcattatgactgatacgctagtttcattatgactgatgccgctagtttcattatgactgatgctttagtttcattatgactgatgatctagtttcattatgactgatacgctagtttcattatgactga

SEQ ID NO: 6069 - DNA, 133 bp, synthetic construct
  source 1..133: mol_type = other DNA
tcagtcataatgaaacttacgcttcagtcataatgaaacttgccgcttcagtcataatgaaacttgcttttcagtcataatgaaacttgatcttcagtcataatgaaacttacgcttcagtcataatgaaact

SEQ ID NO: 6070 - DNA, 133 bp, synthetic construct
  source 1..133: mol_type = other DNA
agtttcattatgactgttacgctagtttcattatgactgttgccgctagtttcattatgactgttgctttagtttcattatgactgttgatctagtttcattatgactgttacgctagtttcattatgactgt

SEQ ID NO: 6071 - DNA, 133 bp, synthetic construct
  source 1..133: mol_type = other DNA
acagtcataatgaaacttacgctacagtcataatgaaacttgccgctacagtcataatgaaacttgctttacagtcataatgaaacttgatctacagtcataatgaaacttacgctacagtcataatgaaact

SEQ ID NO: 6072 - DNA, 133 bp, synthetic construct
  source 1..133: mol_type = other DNA
agtttcattctgactgatacgctagtttcattctgactgatgccgctagtttcattctgactgatgctttagtttcattctgactgatgatctagtttcattctgactgatacgctagtttcattctgactga

SEQ ID NO: 6073 - DNA, 133 bp, synthetic construct
  source 1..133: mol_type = other DNA
tcagtcagaatgaaacttacgcttcagtcagaatgaaacttgccgcttcagtcagaatgaaacttgcttttcagtcagaatgaaacttgatcttcagtcagaatgaaacttacgcttcagtcagaatgaaact

SEQ ID NO: 6074 - DNA, 133 bp, synthetic construct
  source 1..133: mol_type = other DNA
agtttcattctgactgttacgctagtttcattctgactgttgccgctagtttcattctgactgttgctttagtttcattctgactgttgatctagtttcattctgactgttacgctagtttcattctgactgt

SEQ ID NO: 6075 - DNA, 133 bp, synthetic construct
  source 1..133: mol_type = other DNA
acagtcagaatgaaacttacgctacagtcagaatgaaacttgccgctacagtcagaatgaaacttgctttacagtcagaatgaaacttgatctacagtcagaatgaaacttacgctacagtcagaatgaaact

SEQ ID NO: 6076 - DNA, 133 bp, synthetic construct
  source 1..133: mol_type = other DNA
agtttcattttgactgatacgctagtttcattttgactgatgccgctagtttcattttgactgatgctttagtttcattttgactgatgatctagtttcattttgactgatacgctagtttcattttgactga

SEQ ID NO: 6077 - DNA, 133 bp, synthetic construct
  source 1..133: mol_type = other DNA
tcagtcaaaatgaaacttacgcttcagtcaaaatgaaacttgccgcttcagtcaaaatgaaacttgcttttcagtcaaaatgaaacttgatcttcagtcaaaatgaaacttacgcttcagtcaaaatgaaact

SEQ ID NO: 6078 - DNA, 133 bp, synthetic construct
  source 1..133: mol_type = other DNA
agtttcattttgactgttacgctagtttcattttgactgttgccgctagtttcattttgactgttgctttagtttcattttgactgttgatctagtttcattttgactgttacgctagtttcattttgactgt

SEQ ID NO: 6079 - DNA, 133 bp, synthetic construct
  source 1..133: mol_type = other DNA
acagtcaaaatgaaacttacgctacagtcaaaatgaaacttgccgctacagtcaaaatgaaacttgctttacagtcaaaatgaaacttgatctacagtcaaaatgaaacttacgctacagtcaaaatgaaact

SEQ ID NO: 6080 - DNA, 136 bp, synthetic construct
  source 1..136: mol_type = other DNA
ctaagtgctacgctctaagtgctgccgctctaagtgctgctttctaagtgctgatctctaagtgctacgctctaagtgctgccgctctaagtgctgctttctaagtgctgatctctaagtgctacgctctaagtgc

SEQ ID NO: 6081 - DNA, 136 bp, synthetic construct
  source 1..136: mol_type = other DNA
gcacttagtacgctgcacttagtgccgctgcacttagtgctttgcacttagtgatctgcacttagtacgctgcacttagtgccgctgcacttagtgctttgcacttagtgatctgcacttagtacgctgcacttag

SEQ ID NO: 6082 - DNA, 136 bp, synthetic construct
  source 1..136: mol_type = other DNA
ctaattgctacgctctaattgctgccgctctaattgctgctttctaattgctgatctctaattgctacgctctaattgctgccgctctaattgctgctttctaattgctgatctctaattgctacgctctaattgc

SEQ ID NO: 6083 - DNA, 136 bp, synthetic construct
  source 1..136: mol_type = other DNA
gcaattagtacgctgcaattagtgccgctgcaattagtgctttgcaattagtgatctgcaattagtacgctgcaattagtgccgctgcaattagtgctttgcaattagtgatctgcaattagtacgctgcaattag

SEQ ID NO: 6084 - DNA, 136 bp, synthetic construct
  source 1..136: mol_type = other DNA
ttaagtgctacgctttaagtgctgccgctttaagtgctgctttttaagtgctgatctttaagtgctacgctttaagtgctgccgctttaagtgctgctttttaagtgctgatctttaagtgctacgctttaagtgc

SEQ ID NO: 6085 - DNA, 136 bp, synthetic construct
  source 1..136: mol_type = other DNA
gcacttaatacgctgcacttaatgccgctgcacttaatgctttgcacttaatgatctgcacttaatacgctgcacttaatgccgctgcacttaatgctttgcacttaatgatctgcacttaatacgctgcacttaa

SEQ ID NO: 6086 - DNA, 136 bp, synthetic construct
  source 1..136: mol_type = other DNA
ttaattgctacgctttaattgctgccgctttaattgctgctttttaattgctgatctttaattgctacgctttaattgctgccgctttaattgctgctttttaattgctgatctttaattgctacgctttaattgc

SEQ ID NO: 6087 - DNA, 136 bp, synthetic construct
  source 1..136: mol_type = other DNA
gcaattaatacgctgcaattaatgccgctgcaattaatgctttgcaattaatgatctgcaattaatacgctgcaattaatgccgctgcaattaatgctttgcaattaatgatctgcaattaatacgctgcaattaa

SEQ ID NO: 6088 - DNA, 136 bp, synthetic construct
  source 1..136: mol_type = other DNA
tgtcagcttacgcttgtcagcttgccgcttgtcagcttgcttttgtcagcttgatcttgtcagcttacgcttgtcagcttgccgcttgtcagcttgcttttgtcagcttgatcttgtcagcttacgcttgtcagct

SEQ ID NO: 6089 - DNA, 136 bp, synthetic construct
  source 1..136: mol_type = other DNA
agctgacatacgctagctgacatgccgctagctgacatgctttagctgacatgatctagctgacatacgctagctgacatgccgctagctgacatgctttagctgacatgatctagctgacatacgctagctgaca

SEQ ID NO: 6090 - DNA, 136 bp, synthetic construct
  source 1..136: mol_type = other DNA
tgtcagtttacgcttgtcagtttgccgcttgtcagtttgcttttgtcagtttgatcttgtcagtttacgcttgtcagtttgccgcttgtcagtttgcttttgtcagtttgatcttgtcagtttacgcttgtcagtt

SEQ ID NO: 6091 - DNA, 136 bp, synthetic construct
  source 1..136: mol_type = other DNA
aactgacatacgctaactgacatgccgctaactgacatgctttaactgacatgatctaactgacatacgctaactgacatgccgctaactgacatgctttaactgacatgatctaactgacatacgctaactgaca

SEQ ID NO: 6092 - DNA, 140 bp, synthetic construct
  source 1..140: mol_type = other DNA
gccccacccatgccgctgccccacccatgctttgccccacccatgatctgccccacccatacgctgccccacccatgccgctgccccacccatgctttgccccacccatgatctgccccacccatacgctgccccaccca

SEQ ID NO: 6093 - DNA, 140 bp, synthetic construct
  source 1..140: mol_type = other DNA
tgggtggggctgccgcttgggtggggctgcttttgggtggggctgatcttgggtggggctacgcttgggtggggctgccgcttgggtggggctgcttttgggtggggctgatcttgggtggggctacgcttgggtggggc

SEQ ID NO: 6094 - DNA, 140 bp, synthetic construct
  source 1..140: mol_type = other DNA
gccccacccctgccgctgccccacccctgctttgccccacccctgatctgccccacccctacgctgccccacccctgccgctgccccacccctgctttgccccacccctgatctgccccacccctacgctgccccacccc

SEQ ID NO: 6095 - DNA, 140 bp, synthetic construct
  source 1..140: mol_type = other DNA
ggggtggggctgccgctggggtggggctgctttggggtggggctgatctggggtggggctacgctggggtggggctgccgctggggtggggctgctttggggtggggctgatctggggtggggctacgctggggtggggc

SEQ ID NO: 6096 - DNA, 140 bp, synthetic construct
  source 1..140: mol_type = other DNA
gccccacccttgccgctgccccacccttgctttgccccacccttgatctgccccacccttacgctgccccacccttgccgctgccccacccttgctttgccccacccttgatctgccccacccttacgctgccccaccct

SEQ ID NO: 6097 - DNA, 140 bp, synthetic construct
  source 1..140: mol_type = other DNA
agggtggggctgccgctagggtggggctgctttagggtggggctgatctagggtggggctacgctagggtggggctgccgctagggtggggctgctttagggtggggctgatctagggtggggctacgctagggtggggc

SEQ ID NO: 6098 - DNA, 140 bp, synthetic construct
  source 1..140: mol_type = other DNA
gccccgcccatgccgctgccccgcccatgctttgccccgcccatgatctgccccgcccatacgctgccccgcccatgccgctgccccgcccatgctttgccccgcccatgatctgccccgcccatacgctgccccgccca

SEQ ID NO: 6099 - DNA, 140 bp, synthetic construct
  source 1..140: mol_type = other DNA
tgggcggggctgccgcttgggcggggctgcttttgggcggggctgatcttgggcggggctacgcttgggcggggctgccgcttgggcggggctgcttttgggcggggctgatcttgggcggggctacgcttgggcggggc

SEQ ID NO: 6100 - DNA, 140 bp, synthetic construct
  source 1..140: mol_type = other DNA
gccccgcccctgccgctgccccgcccctgctttgccccgcccctgatctgccccgcccctacgctgccccgcccctgccgctgccccgcccctgctttgccccgcccctgatctgccccgcccctacgctgccccgcccc

SEQ ID NO: 6101 - DNA, 140 bp, synthetic construct
  source 1..140: mol_type = other DNA
ggggcggggctgccgctggggcggggctgctttggggcggggctgatctggggcggggctacgctggggcggggctgccgctggggcggggctgctttggggcggggctgatctggggcggggctacgctggggcggggc

SEQ ID NO: 6102 - DNA, 140 bp, synthetic construct
  source 1..140: mol_type = other DNA
gccccgcccttgccgctgccccgcccttgctttgccccgcccttgatctgccccgcccttacgctgccccgcccttgccgctgccccgcccttgctttgccccgcccttgatctgccccgcccttacgctgccccgccct

SEQ ID NO: 6103 - DNA, 140 bp, synthetic construct
  source 1..140: mol_type = other DNA
agggcggggctgccgctagggcggggctgctttagggcggggctgatctagggcggggctacgctagggcggggctgccgctagggcggggctgctttagggcggggctgatctagggcggggctacgctagggcggggc

SEQ ID NO: 6104 - DNA, 139 bp, synthetic construct
  source 1..139: mol_type = other DNA
attcccctgatctattcccctacgctattcccctgccgctattcccctgctttattcccctgatctattcccctacgctattcccctgccgctattcccctgctttattcccctgatctattcccctacgctattcccc

SEQ ID NO: 6105 - DNA, 139 bp, synthetic construct
  source 1..139: mol_type = other DNA
ggggaattgatctggggaattacgctggggaattgccgctggggaattgctttggggaattgatctggggaattacgctggggaattgccgctggggaattgctttggggaattgatctggggaattacgctggggaat

SEQ ID NO: 6106 - DNA, 140 bp, synthetic construct
  source 1..140: mol_type = other DNA
tggcagttggtgccgcttggcagttggtgcttttggcagttggtgatcttggcagttggtacgcttggcagttggtgccgcttggcagttggtgcttttggcagttggtgatcttggcagttggtacgcttggcagttgg

SEQ ID NO: 6107 - DNA, 140 bp, synthetic construct
  source 1..140: mol_type = other DNA
ccaactgccatgccgctccaactgccatgctttccaactgccatgatctccaactgccatacgctccaactgccatgccgctccaactgccatgctttccaactgccatgatctccaactgccatacgctccaactgcca

SEQ ID NO: 6108 - DNA, 139 bp, synthetic construct
  source 1..139: mol_type = other DNA
gggggtgtgtcctgctttgggggtgtgtcctgatctgggggtgtgtcctacgctgggggtgtgtcctgccgctgggggtgtgtcctgctttgggggtgtgtcctgatctgggggtgtgtcctacgctgggggtgtgtcc

SEQ ID NO: 6109 - DNA, 139 bp, synthetic construct
  source 1..139: mol_type = other DNA
ggacacaccccctgctttggacacaccccctgatctggacacaccccctacgctggacacaccccctgccgctggacacaccccctgctttggacacaccccctgatctggacacaccccctacgctggacacaccccc

SEQ ID NO: 6110 - DNA, 142 bp, synthetic construct
  source 1..142: mol_type = other DNA
tgctgactcagcaaatgatcttgctgactcagcaaatacgcttgctgactcagcaaatgccgcttgctgactcagcaaatgcttttgctgactcagcaaatgatcttgctgactcagcaaatacgcttgctgactcagcaaa

SEQ ID NO: 6111 - DNA, 142 bp, synthetic construct
  source 1..142: mol_type = other DNA
tttgctgagtcagcatgatcttttgctgagtcagcatacgcttttgctgagtcagcatgccgcttttgctgagtcagcatgcttttttgctgagtcagcatgatcttttgctgagtcagcatacgcttttgctgagtcagca

SEQ ID NO: 6112 - DNA, 142 bp, synthetic construct
  source 1..142: mol_type = other DNA
tgctgactcagcaattgatcttgctgactcagcaattacgcttgctgactcagcaattgccgcttgctgactcagcaattgcttttgctgactcagcaattgatcttgctgactcagcaattacgcttgctgactcagcaat

SEQ ID NO: 6113 - DNA, 142 bp, synthetic construct
  source 1..142: mol_type = other DNA
attgctgagtcagcatgatctattgctgagtcagcatacgctattgctgagtcagcatgccgctattgctgagtcagcatgctttattgctgagtcagcatgatctattgctgagtcagcatacgctattgctgagtcagca

SEQ ID NO: 6114 - DNA, 139 bp, synthetic construct
  source 1..139: mol_type = other DNA
agccggaagcggtgctttagccggaagcggtgatctagccggaagcggtacgctagccggaagcggtgccgctagccggaagcggtgctttagccggaagcggtgatctagccggaagcggtacgctagccggaagcgg

SEQ ID NO: 6115 - DNA, 139 bp, synthetic construct
  source 1..139: mol_type = other DNA
ccgcttccggcttgctttccgcttccggcttgatctccgcttccggcttacgctccgcttccggcttgccgctccgcttccggcttgctttccgcttccggcttgatctccgcttccggcttacgctccgcttccggct

SEQ ID NO: 6116 - DNA, 139 bp, synthetic construct
  source 1..139: mol_type = other DNA
agccggaagcgctgctttagccggaagcgctgatctagccggaagcgctacgctagccggaagcgctgccgctagccggaagcgctgctttagccggaagcgctgatctagccggaagcgctacgctagccggaagcgc

SEQ ID NO: 6117 - DNA, 139 bp, synthetic construct
  source 1..139: mol_type = other DNA
gcgcttccggcttgctttgcgcttccggcttgatctgcgcttccggcttacgctgcgcttccggcttgccgctgcgcttccggcttgctttgcgcttccggcttgatctgcgcttccggcttacgctgcgcttccggct

SEQ ID NO: 6118 - DNA, 139 bp, synthetic construct
  source 1..139: mol_type = other DNA
agccggaagtggtgctttagccggaagtggtgatctagccggaagtggtacgctagccggaagtggtgccgctagccggaagtggtgctttagccggaagtggtgatctagccggaagtggtacgctagccggaagtgg

SEQ ID NO: 6119 - DNA, 139 bp, synthetic construct
  source 1..139: mol_type = other DNA
ccacttccggcttgctttccacttccggcttgatctccacttccggcttacgctccacttccggcttgccgctccacttccggcttgctttccacttccggcttgatctccacttccggcttacgctccacttccggct

SEQ ID NO: 6120 - DNA, 139 bp, synthetic construct
  source 1..139: mol_type = other DNA
agccggaagtgctgctttagccggaagtgctgatctagccggaagtgctacgctagccggaagtgctgccgctagccggaagtgctgctttagccggaagtgctgatctagccggaagtgctacgctagccggaagtgc

SEQ ID NO: 6121 - DNA, 139 bp, synthetic construct
  source 1..139: mol_type = other DNA
gcacttccggcttgctttgcacttccggcttgatctgcacttccggcttacgctgcacttccggcttgccgctgcacttccggcttgctttgcacttccggcttgatctgcacttccggcttacgctgcacttccggct

SEQ ID NO: 6122 - DNA, 139 bp, synthetic construct
  source 1..139: mol_type = other DNA
acccggaagcggtgctttacccggaagcggtgatctacccggaagcggtacgctacccggaagcggtgccgctacccggaagcggtgctttacccggaagcggtgatctacccggaagcggtacgctacccggaagcgg

SEQ ID NO: 6123 - DNA, 139 bp, synthetic construct
  source 1..139: mol_type = other DNA
ccgcttccgggttgctttccgcttccgggttgatctccgcttccgggttacgctccgcttccgggttgccgctccgcttccgggttgctttccgcttccgggttgatctccgcttccgggttacgctccgcttccgggt

SEQ ID NO: 6124 - DNA, 139 bp, synthetic construct
  source 1..139: mol_type = other DNA
acccggaagcgctgctttacccggaagcgctgatctacccggaagcgctacgctacccggaagcgctgccgctacccggaagcgctgctttacccggaagcgctgatctacccggaagcgctacgctacccggaagcgc

SEQ ID NO: 6125 - DNA, 139 bp, synthetic construct
  source 1..139: mol_type = other DNA
gcgcttccgggttgctttgcgcttccgggttgatctgcgcttccgggttacgctgcgcttccgggttgccgctgcgcttccgggttgctttgcgcttccgggttgatctgcgcttccgggttacgctgcgcttccgggt

SEQ ID NO: 6126 - DNA, 139 bp, synthetic construct
  source 1..139: mol_type = other DNA
acccggaagtggtgctttacccggaagtggtgatctacccggaagtggtacgctacccggaagtggtgccgctacccggaagtggtgctttacccggaagtggtgatctacccggaagtggtacgctacccggaagtgg

SEQ ID NO: 6127 - DNA, 139 bp, synthetic construct
  source 1..139: mol_type = other DNA
ccacttccgggttgctttccacttccgggttgatctccacttccgggttacgctccacttccgggttgccgctccacttccgggttgctttccacttccgggttgatctccacttccgggttacgctccacttccgggt

SEQ ID NO: 6128 - DNA, 139 bp, synthetic construct
  source 1..139: mol_type = other DNA
acccggaagtgctgctttacccggaagtgctgatctacccggaagtgctacgctacccggaagtgctgccgctacccggaagtgctgctttacccggaagtgctgatctacccggaagtgctacgctacccggaagtgc

SEQ ID NO: 6129 - DNA, 139 bp, synthetic construct
  source 1..139: mol_type = other DNA
gcacttccgggttgctttgcacttccgggttgatctgcacttccgggttacgctgcacttccgggttgccgctgcacttccgggttgctttgcacttccgggttgatctgcacttccgggttacgctgcacttccgggt

SEQ ID NO: 6130 - DNA, 135 bp, synthetic construct; identical to SEQ ID NO: 6026
  source 1..135: mol_type = other DNA

SEQ ID NO: 6131 - DNA, 135 bp, synthetic construct; identical to SEQ ID NO: 6027
  source 1..135: mol_type = other DNA

SEQ ID NO: 6132 - DNA, 135 bp, synthetic construct; identical to SEQ ID NO: 6028
  source 1..135: mol_type = other DNA

SEQ ID NO: 6133 - DNA, 135 bp, synthetic construct; identical to SEQ ID NO: 6029
  source 1..135: mol_type = other DNA

SEQ ID NO: 6134 - DNA, 135 bp, synthetic construct; identical to SEQ ID NO: 6030
  source 1..135: mol_type = other DNA

SEQ ID NO: 6135 - DNA, 135 bp, synthetic construct; identical to SEQ ID NO: 6031
  source 1..135: mol_type = other DNA

SEQ ID NO: 6136 - DNA, 135 bp, synthetic construct; identical to SEQ ID NO: 6032
  source 1..135: mol_type = other DNA

SEQ ID NO: 6137 - DNA, 135 bp, synthetic construct; identical to SEQ ID NO: 6033
  source 1..135: mol_type = other DNA

SEQ ID NO: 6138 - DNA, 146 bp, synthetic construct
  source 1..146: mol_type = other DNA
ccaaggtcatacgctccaaggtcatgccgctccaaggtcatgctttccaaggtcatgatctccaaggtcatacgctccaaggtcatgccgctccaaggtcatgctttccaaggtcatgatctccaaggtcatacgctccaaggtca

SEQ ID NO: 6139 - DNA, 146 bp, synthetic construct
  source 1..146: mol_type = other DNA
tgaccttggtacgcttgaccttggtgccgcttgaccttggtgcttttgaccttggtgatcttgaccttggtacgcttgaccttggtgccgcttgaccttggtgcttttgaccttggtgatcttgaccttggtacgcttgaccttgg

SEQ ID NO: 6140 - DNA, 139 bp, synthetic construct
  source 1..139: mol_type = other DNA
aaaaaccccagatgctttaaaaaccccagatgatctaaaaaccccagatacgctaaaaaccccagatgccgctaaaaaccccagatgctttaaaaaccccagatgatctaaaaaccccagatacgctaaaaaccccaga

SEQ ID NO: 6141 - DNA, 139 bp, synthetic construct
  source 1..139: mol_type = other DNA
tctggggttttttgcttttctggggttttttgatcttctggggttttttacgcttctggggttttttgccgcttctggggttttttgcttttctggggttttttgatcttctggggttttttacgcttctggggttttt

SEQ ID NO: 6142 - DNA, 139 bp, synthetic construct
  source 1..139: mol_type = other DNA
aaaagccccagatgctttaaaagccccagatgatctaaaagccccagatacgctaaaagccccagatgccgctaaaagccccagatgctttaaaagccccagatgatctaaaagccccagatacgctaaaagccccaga

SEQ ID NO: 6143 - DNA, 139 bp, synthetic construct
  source 1..139: mol_type = other DNA
tctggggctttttgcttttctggggctttttgatcttctggggctttttacgcttctggggctttttgccgcttctggggctttttgcttttctggggctttttgatcttctggggctttttacgcttctggggctttt

SEQ ID NO: 6144 - DNA, 136 bp, synthetic construct
  source 1..136: mol_type = other DNA
agaggtcatacgctagaggtcatgccgctagaggtcatgctttagaggtcatgatctagaggtcatacgctagaggtcatgccgctagaggtcatgctttagaggtcatgatctagaggtcatacgctagaggtca

SEQ ID NO: 6145 - DNA, 136 bp, synthetic construct
  source 1..136: mol_type = other DNA
tgacctcttacgcttgacctcttgccgcttgacctcttgcttttgacctcttgatcttgacctcttacgcttgacctcttgccgcttgacctcttgcttttgacctcttgatcttgacctcttacgcttgacctct

SEQ ID NO: 6146 - DNA, 136 bp, synthetic construct
  source 1..136: mol_type = other DNA
aggggtcatacgctaggggtcatgccgctaggggtcatgctttaggggtcatgatctaggggtcatacgctaggggtcatgccgctaggggtcatgctttaggggtcatgatctaggggtcatacgctaggggtca

SEQ ID NO: 6147 - DNA, 136 bp, synthetic construct
  source 1..136: mol_type = other DNA
tgaccccttacgcttgaccccttgccgcttgaccccttgcttttgaccccttgatcttgaccccttacgcttgaccccttgccgcttgaccccttgcttttgaccccttgatcttgaccccttacgcttgacccct

SEQ ID NO: 6148 - DNA, 139 bp, synthetic construct; identical to SEQ ID NO: 5499
  source 1..139: mol_type = other DNA

SEQ ID NO: 6149 - DNA, 139 bp, synthetic construct; identical to SEQ ID NO: 5498
  source 1..139: mol_type = other DNA

SEQ ID NO: 6150 - DNA, 146 bp, synthetic construct
  source 1..146: mol_type = other DNA
agatcaaagtacgctagatcaaagtgccgctagatcaaagtgctttagatcaaagtgatctagatcaaagtacgctagatcaaagtgccgctagatcaaagtgctttagatcaaagtgatctagatcaaagtacgctagatcaaag

SEQ ID NO: 6151 - DNA, 146 bp, synthetic construct
  source 1..146: mol_type = other DNA
ctttgatcttacgctctttgatcttgccgctctttgatcttgctttctttgatcttgatctctttgatcttacgctctttgatcttgccgctctttgatcttgctttctttgatcttgatctctttgatcttacgctctttgatct

SEQ ID NO: 6152 - DNA, 146 bp, synthetic construct
  source 1..146: mol_type = other DNA
acatcaaagtacgctacatcaaagtgccgctacatcaaagtgctttacatcaaagtgatctacatcaaagtacgctacatcaaagtgccgctacatcaaagtgctttacatcaaagtgatctacatcaaagtacgctacatcaaag

SEQ ID NO: 6153 - DNA, 146 bp, synthetic construct
  source 1..146: mol_type = other DNA
ctttgatgttacgctctttgatgttgccgctctttgatgttgctttctttgatgttgatctctttgatgttacgctctttgatgttgccgctctttgatgttgctttctttgatgttgatctctttgatgttacgctctttgatgt

SEQ ID NO: 6154 - DNA, 142 bp, synthetic construct
  source 1..142: mol_type = other DNA
aaaatgctgagtcattgatctaaaatgctgagtcattacgctaaaatgctgagtcattgccgctaaaatgctgagtcattgctttaaaatgctgagtcattgatctaaaatgctgagtcattacgctaaaatgctgagtcat

SEQ ID NO: 6155 - DNA, 142 bp, synthetic construct
  source 1..142: mol_type = other DNA
atgactcagcatttttgatctatgactcagcatttttacgctatgactcagcatttttgccgctatgactcagcatttttgctttatgactcagcatttttgatctatgactcagcatttttacgctatgactcagcatttt

SEQ ID NO: 6156 - DNA, 142 bp, synthetic construct
  source 1..142: mol_type = other DNA
aatatgctgagtcattgatctaatatgctgagtcattacgctaatatgctgagtcattgccgctaatatgctgagtcattgctttaatatgctgagtcattgatctaatatgctgagtcattacgctaatatgctgagtcat

SEQ ID NO: 6157 - DNA, 142 bp, synthetic construct
  source 1..142: mol_type = other DNA
atgactcagcatatttgatctatgactcagcatatttacgctatgactcagcatatttgccgctatgactcagcatatttgctttatgactcagcatatttgatctatgactcagcatatttacgctatgactcagcatatt

SEQ ID NO: 6158 - DNA, 142 bp, synthetic construct
  source 1..142: mol_type = other DNA
ataatgctgagtcattgatctataatgctgagtcattacgctataatgctgagtcattgccgctataatgctgagtcattgctttataatgctgagtcattgatctataatgctgagtcattacgctataatgctgagtcat

SEQ ID NO: 6159 - DNA, 142 bp, synthetic construct
  source 1..142: mol_type = other DNA
atgactcagcattattgatctatgactcagcattattacgctatgactcagcattattgccgctatgactcagcattattgctttatgactcagcattattgatctatgactcagcattattacgctatgactcagcattat

SEQ ID NO: 6160 - DNA, 142 bp, synthetic construct
  source 1..142: mol_type = other DNA
attatgctgagtcattgatctattatgctgagtcattacgctattatgctgagtcattgccgctattatgctgagtcattgctttattatgctgagtcattgatctattatgctgagtcattacgctattatgctgagtcat

SEQ ID NO: 6161 - DNA, 142 bp, synthetic construct
  source 1..142: mol_type = other DNA
atgactcagcataattgatctatgactcagcataattacgctatgactcagcataattgccgctatgactcagcataattgctttatgactcagcataattgatctatgactcagcataattacgctatgactcagcataat

SEQ ID NO: 6162 - DNA, 147 bp, synthetic construct
  source 1..147: mol_type = other DNA
aatatgcaaattatgctttaatatgcaaattatgatctaatatgcaaattatacgctaatatgcaaattatgccgctaatatgcaaattatgctttaatatgcaaattatgatctaatatgcaaattatacgctaatatgcaaatta

SEQ ID NO: 6163 - DNA, 147 bp, synthetic construct
  source 1..147: mol_type = other DNA
taatttgcatatttgcttttaatttgcatatttgatcttaatttgcatatttacgcttaatttgcatatttgccgcttaatttgcatatttgcttttaatttgcatatttgatcttaatttgcatatttacgcttaatttgcatatt

SEQ ID NO: 6164 - DNA, 147 bp, synthetic construct
  source 1..147: mol_type = other DNA
aatatgcaaattttgctttaatatgcaaattttgatctaatatgcaaattttacgctaatatgcaaattttgccgctaatatgcaaattttgctttaatatgcaaattttgatctaatatgcaaattttacgctaatatgcaaattt

SEQ ID NO: 6165 - DNA, 147 bp, synthetic construct
  source 1..147: mol_type = other DNA
aaatttgcatatttgctttaaatttgcatatttgatctaaatttgcatatttacgctaaatttgcatatttgccgctaaatttgcatatttgctttaaatttgcatatttgatctaaatttgcatatttacgctaaatttgcatatt

SEQ ID NO: 6166 - DNA, 147 bp, synthetic construct
  source 1..147: mol_type = other DNA
aatatgctaattatgctttaatatgctaattatgatctaatatgctaattatacgctaatatgctaattatgccgctaatatgctaattatgctttaatatgctaattatgatctaatatgctaattatacgctaatatgctaatta

SEQ ID NO: 6167 - DNA, 147 bp, synthetic construct
  source 1..147: mol_type = other DNA
taattagcatatttgcttttaattagcatatttgatcttaattagcatatttacgcttaattagcatatttgccgcttaattagcatatttgcttttaattagcatatttgatcttaattagcatatttacgcttaattagcatatt

SEQ ID NO: 6168 - DNA, 147 bp, synthetic construct
  source 1..147: mol_type = other DNA
aatatgctaattttgctttaatatgctaattttgatctaatatgctaattttacgctaatatgctaattttgccgctaatatgctaattttgctttaatatgctaattttgatctaatatgctaattttacgctaatatgctaattt

SEQ ID NO: 6169 - DNA, 147 bp, synthetic construct
  source 1..147: mol_type = other DNA
aaattagcatatttgctttaaattagcatatttgatctaaattagcatatttacgctaaattagcatatttgccgctaaattagcatatttgctttaaattagcatatttgatctaaattagcatatttacgctaaattagcatatt

SEQ ID NO: 6170 - DNA, 147 bp, synthetic construct
  source 1..147: mol_type = other DNA
attatgcaaattatgctttattatgcaaattatgatctattatgcaaattatacgctattatgcaaattatgccgctattatgcaaattatgctttattatgcaaattatgatctattatgcaaattatacgctattatgcaaatta

SEQ ID NO: 6171 - DNA, 147 bp, synthetic construct
  source 1..147: mol_type = other DNA
taatttgcataattgcttttaatttgcataattgatcttaatttgcataattacgcttaatttgcataattgccgcttaatttgcataattgcttttaatttgcataattgatcttaatttgcataattacgcttaatttgcataat

SEQ ID NO: 6172 - DNA, 147 bp, synthetic construct
  source 1..147: mol_type = other DNA
attatgcaaattttgctttattatgcaaattttgatctattatgcaaattttacgctattatgcaaattttgccgctattatgcaaattttgctttattatgcaaattttgatctattatgcaaattttacgctattatgcaaattt

SEQ ID NO: 6173 - DNA, 147 bp, synthetic construct
  source 1..147: mol_type = other DNA
aaatttgcataattgctttaaatttgcataattgatctaaatttgcataattacgctaaatttgcataattgccgctaaatttgcataattgctttaaatttgcataattgatctaaatttgcataattacgctaaatttgcataat

SEQ ID NO: 6174 - DNA, 147 bp, synthetic construct
  source 1..147: mol_type = other DNA
attatgctaattatgctttattatgctaattatgatctattatgctaattatacgctattatgctaattatgccgctattatgctaattatgctttattatgctaattatgatctattatgctaattatacgctattatgctaatta

SEQ ID NO: 6175 - DNA, 147 bp, synthetic construct
  source 1..147: mol_type = other DNA
taattagcataattgcttttaattagcataattgatcttaattagcataattacgcttaattagcataattgccgcttaattagcataattgcttttaattagcataattgatcttaattagcataattacgcttaattagcataat

SEQ ID NO: 6176 - DNA, 147 bp, synthetic construct
  source 1..147: mol_type = other DNA
attatgctaattttgctttattatgctaattttgatctattatgctaattttacgctattatgctaattttgccgctattatgctaattttgctttattatgctaattttgatctattatgctaattttacgctattatgctaattt

SEQ ID NO: 6177 - DNA, 147 bp, synthetic construct
  source 1..147: mol_type = other DNA
aaattagcataattgctttaaattagcataattgatctaaattagcataattacgctaaattagcataattgccgctaaattagcataattgctttaaattagcataattgatctaaattagcataattacgctaaattagcataat

SEQ ID NO: 6178 - DNA, 147 bp, synthetic construct
  source 1..147: mol_type = other DNA
tatatgcaaattatgcttttatatgcaaattatgatcttatatgcaaattatacgcttatatgcaaattatgccgcttatatgcaaattatgcttttatatgcaaattatgatcttatatgcaaattatacgcttatatgcaaatta

SEQ ID NO: 6179 - DNA, 147 bp, synthetic construct
  source 1..147: mol_type = other DNA
taatttgcatatatgcttttaatttgcatatatgatcttaatttgcatatatacgcttaatttgcatatatgccgcttaatttgcatatatgcttttaatttgcatatatgatcttaatttgcatatatacgcttaatttgcatata

SEQ ID NO: 6180 - DNA, 147 bp, synthetic construct
  source 1..147: mol_type = other DNA
tatatgcaaattttgcttttatatgcaaattttgatcttatatgcaaattttacgcttatatgcaaattttgccgcttatatgcaaattttgcttttatatgcaaattttgatcttatatgcaaattttacgcttatatgcaaattt

SEQ ID NO: 6181 - DNA, 147 bp, synthetic construct
  source 1..147: mol_type = other DNA
aaatttgcatatatgctttaaatttgcatatatgatctaaatttgcatatatacgctaaatttgcatatatgccgctaaatttgcatatatgctttaaatttgcatatatgatctaaatttgcatatatacgctaaatttgcatata

SEQ ID NO: 6182 - DNA, 147 bp, synthetic construct
  source 1..147: mol_type = other DNA
tatatgctaattatgcttttatatgctaattatgatcttatatgctaattatacgcttatatgctaattatgccgcttatatgctaattatgcttttatatgctaattatgatcttatatgctaattatacgcttatatgctaatta

SEQ ID NO: 6183 - DNA, 147 bp, synthetic construct
  source 1..147: mol_type = other DNA
taattagcatatatgcttttaattagcatatatgatcttaattagcatatatacgcttaattagcatatatgccgcttaattagcatatatgcttttaattagcatatatgatcttaattagcatatatacgcttaattagcatata

SEQ ID NO: 6184 - DNA, 147 bp, synthetic construct
  source 1..147: mol_type = other DNA
tatatgctaattttgcttttatatgctaattttgatcttatatgctaattttacgcttatatgctaattttgccgcttatatgctaattttgcttttatatgctaattttgatcttatatgctaattttacgcttatatgctaattt

SEQ ID NO: 6185 - DNA, 147 bp, synthetic construct
  source 1..147: mol_type = other DNA
aaattagcatatatgctttaaattagcatatatgatctaaattagcatatatacgctaaattagcatatatgccgctaaattagcatatatgctttaaattagcatatatgatctaaattagcatatatacgctaaattagcatata

SEQ ID NO: 6186 - DNA, 147 bp, synthetic construct
  source 1..147: mol_type = other DNA
tttatgcaaattatgcttttttatgcaaattatgatcttttatgcaaattatacgcttttatgcaaattatgccgcttttatgcaaattatgcttttttatgcaaattatgatcttttatgcaaattatacgcttttatgcaaatta

SEQ ID NO: 6187 - DNA, 147 bp, synthetic construct
  source 1..147: mol_type = other DNA
taatttgcataaatgcttttaatttgcataaatgatcttaatttgcataaatacgcttaatttgcataaatgccgcttaatttgcataaatgcttttaatttgcataaatgatcttaatttgcataaatacgcttaatttgcataaa

SEQ ID NO: 6188 - DNA, 147 bp, synthetic construct
  source 1..147: mol_type = other DNA
tttatgcaaattttgcttttttatgcaaattttgatcttttatgcaaattttacgcttttatgcaaattttgccgcttttatgcaaattttgcttttttatgcaaattttgatcttttatgcaaattttacgcttttatgcaaattt

SEQ ID NO: 6189 - DNA, 147 bp, synthetic construct
  source 1..147: mol_type = other DNA
aaatttgcataaatgctttaaatttgcataaatgatctaaatttgcataaatacgctaaatttgcataaatgccgctaaatttgcataaatgctttaaatttgcataaatgatctaaatttgcataaatacgctaaatttgcataaa

SEQ ID NO: 6190 - DNA, 147 bp, synthetic construct
  source 1..147: mol_type = other DNA
tttatgctaattatgcttttttatgctaattatgatcttttatgctaattatacgcttttatgctaattatgccgcttttatgctaattatgcttttttatgctaattatgatcttttatgctaattatacgcttttatgctaatta

SEQ ID NO: 6191 - DNA, 147 bp, synthetic construct
  source 1..147: mol_type = other DNA
taattagcataaatgcttttaattagcataaatgatcttaattagcataaatacgcttaattagcataaatgccgcttaattagcataaatgcttttaattagcataaatgatcttaattagcataaatacgcttaattagcataaa

SEQ ID NO: 6192 - DNA, 147 bp, synthetic construct
  source 1..147: mol_type = other DNA
tttatgctaattttgcttttttatgctaattttgatcttttatgctaattttacgcttttatgctaattttgccgcttttatgctaattttgcttttttatgctaattttgatcttttatgctaattttacgcttttatgctaattt

SEQ ID NO: 6193 - DNA, 147 bp, synthetic construct
  source 1..147: mol_type = other DNA
aaattagcataaatgctttaaattagcataaatgatctaaattagcataaatacgctaaattagcataaatgccgctaaattagcataaatgctttaaattagcataaatgatctaaattagcataaatacgctaaattagcataaa

SEQ ID NO: 6194 - DNA, 147 bp, synthetic construct
  source 1..147: mol_type = other DNA
agataagcatcagtgctttagataagcatcagtgatctagataagcatcagtacgctagataagcatcagtgccgctagataagcatcagtgctttagataagcatcagtgatctagataagcatcagtacgctagataagcatcag

SEQ ID NO: 6195 - DNA, 147 bp, synthetic construct
  source 1..147: mol_type = other DNA
ctgatgcttatcttgctttctgatgcttatcttgatctctgatgcttatcttacgctctgatgcttatcttgccgctctgatgcttatcttgctttctgatgcttatcttgatctctgatgcttatcttacgctctgatgcttatct

SEQ ID NO: 6196 - DNA, 147 bp, synthetic construct
  source 1..147: mol_type = other DNA
agataagcatcactgctttagataagcatcactgatctagataagcatcactacgctagataagcatcactgccgctagataagcatcactgctttagataagcatcactgatctagataagcatcactacgctagataagcatcac

SEQ ID NO: 6197 - DNA, 147 bp, synthetic construct
  source 1..147: mol_type = other DNA
gtgatgcttatcttgctttgtgatgcttatcttgatctgtgatgcttatcttacgctgtgatgcttatcttgccgctgtgatgcttatcttgctttgtgatgcttatcttgatctgtgatgcttatcttacgctgtgatgcttatct

SEQ ID NO: 6198 - DNA, 147 bp, synthetic construct
  source 1..147: mol_type = other DNA
agataagcatctgtgctttagataagcatctgtgatctagataagcatctgtacgctagataagcatctgtgccgctagataagcatctgtgctttagataagcatctgtgatctagataagcatctgtacgctagataagcatctg

SEQ ID NO: 6199 - DNA, 147 bp, synthetic construct
  source 1..147: mol_type = other DNA
cagatgcttatcttgctttcagatgcttatcttgatctcagatgcttatcttacgctcagatgcttatcttgccgctcagatgcttatcttgctttcagatgcttatcttgatctcagatgcttatcttacgctcagatgcttatct

SEQ ID NO: 6200 - DNA, 147 bp, synthetic construct
  source 1..147: mol_type = other DNA
agataagcatctctgctttagataagcatctctgatctagataagcatctctacgctagataagcatctctgccgctagataagcatctctgctttagataagcatctctgatctagataagcatctctacgctagataagcatctc

SEQ ID NO: 6201 - DNA, 147 bp, synthetic construct
  source 1..147: mol_type = other DNA
gagatgcttatcttgctttgagatgcttatcttgatctgagatgcttatcttacgctgagatgcttatcttgccgctgagatgcttatcttgctttgagatgcttatcttgatctgagatgcttatcttacgctgagatgcttatct

SEQ ID NO: 6202 - DNA, 147 bp, synthetic construct
  source 1..147: mol_type = other DNA
agataggcatcagtgctttagataggcatcagtgatctagataggcatcagtacgctagataggcatcagtgccgctagataggcatcagtgctttagataggcatcagtgatctagataggcatcagtacgctagataggcatcag

SEQ ID NO: 6203 - DNA, 147 bp, synthetic construct
  source 1..147: mol_type = other DNA
ctgatgcctatcttgctttctgatgcctatcttgatctctgatgcctatcttacgctctgatgcctatcttgccgctctgatgcctatcttgctttctgatgcctatcttgatctctgatgcctatcttacgctctgatgcctatct

SEQ ID NO: 6204 - DNA, 147 bp, synthetic construct
  source 1..147: mol_type = other DNA
agataggcatcactgctttagataggcatcactgatctagataggcatcactacgctagataggcatcactgccgctagataggcatcactgctttagataggcatcactgatctagataggcatcactacgctagataggcatcac

SEQ ID NO: 6205 - DNA, 147 bp, synthetic construct
  source 1..147: mol_type = other DNA
gtgatgcctatcttgctttgtgatgcctatcttgatctgtgatgcctatcttacgctgtgatgcctatcttgccgctgtgatgcctatcttgctttgtgatgcctatcttgatctgtgatgcctatcttacgctgtgatgcctatct

SEQ ID NO: 6206 - DNA, 147 bp, synthetic construct
  source 1..147: mol_type = other DNA
agataggcatctgtgctttagataggcatctgtgatctagataggcatctgtacgctagataggcatctgtgccgctagataggcatctgtgctttagataggcatctgtgatctagataggcatctgtacgctagataggcatctg

SEQ ID NO: 6207 - DNA, 147 bp, synthetic construct
  source 1..147: mol_type = other DNA
cagatgcctatcttgctttcagatgcctatcttgatctcagatgcctatcttacgctcagatgcctatcttgccgctcagatgcctatcttgctttcagatgcctatcttgatctcagatgcctatcttacgctcagatgcctatct

SEQ ID NO: 6208 - DNA, 147 bp, synthetic construct
  source 1..147: mol_type = other DNA
agataggcatctctgctttagataggcatctctgatctagataggcatctctacgctagataggcatctctgccgctagataggcatctctgctttagataggcatctctgatctagataggcatctctacgctagataggcatctc

SEQ ID NO: 6209 - DNA, 147 bp, synthetic construct
  source 1..147: mol_type = other DNA
gagatgcctatcttgctttgagatgcctatcttgatctgagatgcctatcttacgctgagatgcctatcttgccgctgagatgcctatcttgctttgagatgcctatcttgatctgagatgcctatcttacgctgagatgcctatct

SEQ ID NO: 6210 - DNA, 147 bp, synthetic construct
  source 1..147: mol_type = other DNA
tgataagcatcagtgcttttgataagcatcagtgatcttgataagcatcagtacgcttgataagcatcagtgccgcttgataagcatcagtgcttttgataagcatcagtgatcttgataagcatcagtacgcttgataagcatcag

SEQ ID NO: 6211 - DNA, 147 bp, synthetic construct
  source 1..147: mol_type = other DNA
ctgatgcttatcatgctttctgatgcttatcatgatctctgatgcttatcatacgctctgatgcttatcatgccgctctgatgcttatcatgctttctgatgcttatcatgatctctgatgcttatcatacgctctgatgcttatca

SEQ ID NO: 6212 - DNA, 147 bp, synthetic construct
  source 1..147: mol_type = other DNA
tgataagcatcactgcttttgataagcatcactgatcttgataagcatcactacgcttgataagcatcactgccgcttgataagcatcactgcttttgataagcatcactgatcttgataagcatcactacgcttgataagcatcac

SEQ ID NO: 6213 - DNA, 147 bp, synthetic construct
  source 1..147: mol_type = other DNA
gtgatgcttatcatgctttgtgatgcttatcatgatctgtgatgcttatcatacgctgtgatgcttatcatgccgctgtgatgcttatcatgctttgtgatgcttatcatgatctgtgatgcttatcatacgctgtgatgcttatca

SEQ ID NO: 6214 - DNA, 147 bp, synthetic construct
  source 1..147: mol_type = other DNA
tgataagcatctgtgcttttgataagcatctgtgatcttgataagcatctgtacgcttgataagcatctgtgccgcttgataagcatctgtgcttttgataagcatctgtgatcttgataagcatctgtacgcttgataagcatctg

SEQ ID NO: 6215 - DNA, 147 bp, synthetic construct
  source 1..147: mol_type = other DNA
cagatgcttatcatgctttcagatgcttatcatgatctcagatgcttatcatacgctcagatgcttatcatgccgctcagatgcttatcatgctttcagatgcttatcatgatctcagatgcttatcatacgctcagatgcttatca

SEQ ID NO: 6216 - DNA, 147 bp, synthetic construct
  source 1..147: mol_type = other DNA
tgataagcatctctgcttttgataagcatctctgatcttgataagcatctctacgcttgataagcatctctgccgcttgataagcatctctgcttttgataagcatctctgatcttgataagcatctctacgcttgataagcatctc

SEQ ID NO: 6217 - DNA, 147 bp, synthetic construct
  source 1..147: mol_type = other DNA
gagatgcttatcatgctttgagatgcttatcatgatctgagatgcttatcatacgctgagatgcttatcatgccgctgagatgcttatcatgctttgagatgcttatcatgatctgagatgcttatcatacgctgagatgcttatca

SEQ ID NO: 6218 - DNA, 147 bp, synthetic construct
  source 1..147: mol_type = other DNA
tgataggcatcagtgcttttgataggcatcagtgatcttgataggcatcagtacgcttgataggcatcagtgccgcttgataggcatcagtgcttttgataggcatcagtgatcttgataggcatcagtacgcttgataggcatcag

SEQ ID NO: 6219 - DNA, 147 bp, synthetic construct
  source 1..147: mol_type = other DNA
ctgatgcctatcatgctttctgatgcctatcatgatctctgatgcctatcatacgctctgatgcctatcatgccgctctgatgcctatcatgctttctgatgcctatcatgatctctgatgcctatcatacgctctgatgcctatca

SEQ ID NO: 6220 - DNA, 147 bp, synthetic construct
  source 1..147: mol_type = other DNA
tgataggcatcactgcttttgataggcatcactgatcttgataggcatcactacgcttgataggcatcactgccgcttgataggcatcactgcttttgataggcatcactgatcttgataggcatcactacgcttgataggcatcac

SEQ ID NO: 6221 - DNA, 147 bp, synthetic construct
  source 1..147: mol_type = other DNA
gtgatgcctatcatgctttgtgatgcctatcatgatctgtgatgcctatcatacgctgtgatgcctatcatgccgctgtgatgcctatcatgctttgtgatgcctatcatgatctgtgatgcctatcatacgctgtgatgcctatca

SEQ ID NO: 6222 - DNA, 147 bp, synthetic construct
  source 1..147: mol_type = other DNA
tgataggcatctgtgcttttgataggcatctgtgatcttgataggcatctgtacgcttgataggcatctgtgccgcttgataggcatctgtgcttttgataggcatctgtgatcttgataggcatctgtacgcttgataggcatctg

SEQ ID NO: 6223 - DNA, 147 bp, synthetic construct
  source 1..147: mol_type = other DNA
cagatgcctatcatgctttcagatgcctatcatgatctcagatgcctatcatacgctcagatgcctatcatgccgctcagatgcctatcatgctttcagatgcctatcatgatctcagatgcctatcatacgctcagatgcctatca

SEQ ID NO: 6224 - DNA, 147 bp, synthetic construct
  source 1..147: mol_type = other DNA
tgataggcatctctgcttttgataggcatctctgatcttgataggcatctctacgcttgataggcatctctgccgcttgataggcatctctgcttttgataggcatctctgatcttgataggcatctctacgcttgataggcatctc

SEQ ID NO: 6225 - DNA, 147 bp, synthetic construct
  source 1..147: mol_type = other DNA
gagatgcctatcatgctttgagatgcctatcatgatctgagatgcctatcatacgctgagatgcctatcatgccgctgagatgcctatcatgctttgagatgcctatcatgatctgagatgcctatcatacgctgagatgcctatca

SEQ ID NO: 6226 - DNA, 140 bp, synthetic construct
  source 1..140: mol_type = other DNA
aacagctgattgccgctaacagctgattgctttaacagctgattgatctaacagctgattacgctaacagctgattgccgctaacagctgattgctttaacagctgattgatctaacagctgattacgctaacagctgat

SEQ ID NO: 6227 - DNA, 140 bp, synthetic construct
  source 1..140: mol_type = other DNA
atcagctgtttgccgctatcagctgtttgctttatcagctgtttgatctatcagctgtttacgctatcagctgtttgccgctatcagctgtttgctttatcagctgtttgatctatcagctgtttacgctatcagctgtt

SEQ ID NO: 6228 - DNA, 140 bp, synthetic construct
  source 1..140: mol_type = other DNA
atcagctgattgccgctatcagctgattgctttatcagctgattgatctatcagctgattacgctatcagctgattgccgctatcagctgattgctttatcagctgattgatctatcagctgattacgctatcagctgat

SEQ ID NO: 6229 - DNA, 140 bp, synthetic construct; identical to SEQ ID NO: 6228
  source 1..140: mol_type = other DNA

SEQ ID NO: 6230 - DNA, 142 bp, synthetic construct; identical to SEQ ID NO: 6154
  source 1..142: mol_type = other DNA

SEQ ID NO: 6231 - DNA, 142 bp, synthetic construct; identical to SEQ ID NO: 6155
  source 1..142: mol_type = other DNA

SEQ ID NO: 6232 - DNA, 142 bp, synthetic construct
  source 1..142: mol_type = other DNA
aaattgctgagtcattgatctaaattgctgagtcattacgctaaattgctgagtcattgccgctaaattgctgagtcattgctttaaattgctgagtcattgatctaaattgctgagtcattacgctaaattgctgagtcat

SEQ ID NO: 6233 - DNA, 142 bp, synthetic construct
  source 1..142: mol_type = other DNA
atgactcagcaattttgatctatgactcagcaattttacgctatgactcagcaattttgccgctatgactcagcaattttgctttatgactcagcaattttgatctatgactcagcaattttacgctatgactcagcaattt

SEQ ID NO: 6234 - DNA, 142 bp, synthetic construct; identical to SEQ ID NO: 6156
  source 1..142: mol_type = other DNA

SEQ ID NO: 6235 - DNA, 142 bp, synthetic construct; identical to SEQ ID NO: 6157
  source 1..142: mol_type = other DNA

SEQ ID NO: 6236 - DNA, 142 bp, synthetic construct
  source 1..142: mol_type = other DNA
aatttgctgagtcattgatctaatttgctgagtcattacgctaatttgctgagtcattgccgctaatttgctgagtcattgctttaatttgctgagtcattgatctaatttgctgagtcattacgctaatttgctgagtcat

SEQ ID NO: 6237 - DNA, 142 bp, synthetic construct
  source 1..142: mol_type = other DNA
atgactcagcaaatttgatctatgactcagcaaatttacgctatgactcagcaaatttgccgctatgactcagcaaatttgctttatgactcagcaaatttgatctatgactcagcaaatttacgctatgactcagcaaatt

SEQ ID NO: 6238 - DNA, 142 bp, synthetic construct; identical to SEQ ID NO: 6158
  source 1..142: mol_type = other DNA

SEQ ID NO: 6239 - DNA, 142 bp, synthetic construct; identical to SEQ ID NO: 6159
  source 1..142: mol_type = other DNA

SEQ ID NO: 6240 - DNA, 142 bp, synthetic construct
  source 1..142: mol_type = other DNA
atattgctgagtcattgatctatattgctgagtcattacgctatattgctgagtcattgccgctatattgctgagtcattgctttatattgctgagtcattgatctatattgctgagtcattacgctatattgctgagtcat

SEQ ID NO: 6241 - DNA, 142 bp, synthetic construct
  source 1..142: mol_type = other DNA
atgactcagcaatattgatctatgactcagcaatattacgctatgactcagcaatattgccgctatgactcagcaatattgctttatgactcagcaatattgatctatgactcagcaatattacgctatgactcagcaatat

SEQ ID NO: 6242 - DNA, 142 bp, synthetic construct; identical to SEQ ID NO: 6160
  source 1..142: mol_type = other DNA

SEQ ID NO: 6243 - DNA, 142 bp, synthetic construct; identical to SEQ ID NO: 6161
  source 1..142: mol_type = other DNA

SEQ ID NO: 6244 - DNA, 142 bp, synthetic construct
  source 1..142: mol_type = other DNA
attttgctgagtcattgatctattttgctgagtcattacgctattttgctgagtcattgccgctattttgctgagtcattgctttattttgctgagtcattgatctattttgctgagtcattacgctattttgctgagtcat

SEQ ID NO: 6245 - DNA, 142 bp, synthetic construct
  source 1..142: mol_type = other DNA
atgactcagcaaaattgatctatgactcagcaaaattacgctatgactcagcaaaattgccgctatgactcagcaaaattgctttatgactcagcaaaattgatctatgactcagcaaaattacgctatgactcagcaaaat

SEQ ID NO: 6246 - DNA, 135 bp, synthetic construct
  source 1..135: mol_type = other DNA
tttcagttccccattgatcttttcagttccccattacgcttttcagttccccattgccgcttttcagttccccattgcttttttcagttccccattgatcttttcagttccccattacgcttttcagttccccat

SEQ ID NO: 6247 - DNA, 135 bp, synthetic construct
  source 1..135: mol_type = other DNA
atggggaactgaaatgatctatggggaactgaaatacgctatggggaactgaaatgccgctatggggaactgaaatgctttatggggaactgaaatgatctatggggaactgaaatacgctatggggaactgaaa

SEQ ID NO: 6248 - DNA, 135 bp, synthetic construct
  source 1..135: mol_type = other DNA
tttcagttcctcattgatcttttcagttcctcattacgcttttcagttcctcattgccgcttttcagttcctcattgcttttttcagttcctcattgatcttttcagttcctcattacgcttttcagttcctcat

SEQ ID NO: 6249 - DNA, 135 bp, synthetic construct
  source 1..135: mol_type = other DNA
atgaggaactgaaatgatctatgaggaactgaaatacgctatgaggaactgaaatgccgctatgaggaactgaaatgctttatgaggaactgaaatgatctatgaggaactgaaatacgctatgaggaactgaaa

SEQ ID NO: 6250 - DNA, 135 bp, synthetic construct
  source 1..135: mol_type = other DNA
tttcacttccccattgatcttttcacttccccattacgcttttcacttccccattgccgcttttcacttccccattgcttttttcacttccccattgatcttttcacttccccattacgcttttcacttccccat

SEQ ID NO: 6251 - DNA, 135 bp, synthetic construct
  source 1..135: mol_type = other DNA
atggggaagtgaaatgatctatggggaagtgaaatacgctatggggaagtgaaatgccgctatggggaagtgaaatgctttatggggaagtgaaatgatctatggggaagtgaaatacgctatggggaagtgaaa

SEQ ID NO: 6252 - DNA, 135 bp, synthetic construct
  source 1..135: mol_type = other DNA
tttcacttcctcattgatcttttcacttcctcattacgcttttcacttcctcattgccgcttttcacttcctcattgcttttttcacttcctcattgatcttttcacttcctcattacgcttttcacttcctcat

SEQ ID NO: 6253 - DNA, 135 bp, synthetic construct
  source 1..135: mol_type = other DNA
atgaggaagtgaaatgatctatgaggaagtgaaatacgctatgaggaagtgaaatgccgctatgaggaagtgaaatgctttatgaggaagtgaaatgatctatgaggaagtgaaatacgctatgaggaagtgaaa

SEQ ID NO: 6254 - DNA, 136 bp, synthetic construct
  source 1..136: mol_type = other DNA
ttgacaagtacgctttgacaagtgccgctttgacaagtgctttttgacaagtgatctttgacaagtacgctttgacaagtgccgctttgacaagtgctttttgacaagtgatctttgacaagtacgctttgacaag

SEQ ID NO: 6255 - DNA, 136 bp, synthetic construct
  source 1..136: mol_type = other DNA
cttgtcaatacgctcttgtcaatgccgctcttgtcaatgctttcttgtcaatgatctcttgtcaatacgctcttgtcaatgccgctcttgtcaatgctttcttgtcaatgatctcttgtcaatacgctcttgtcaa

SEQ ID NO: 6256 - DNA, 136 bp, synthetic construct
  source 1..136: mol_type = other DNA
ttgacatgtacgctttgacatgtgccgctttgacatgtgctttttgacatgtgatctttgacatgtacgctttgacatgtgccgctttgacatgtgctttttgacatgtgatctttgacatgtacgctttgacatg

SEQ ID NO: 6257 - DNA, 136 bp, synthetic construct
  source 1..136: mol_type = other DNA
catgtcaatacgctcatgtcaatgccgctcatgtcaatgctttcatgtcaatgatctcatgtcaatacgctcatgtcaatgccgctcatgtcaatgctttcatgtcaatgatctcatgtcaatacgctcatgtcaa

SEQ ID NO: 6258 - DNA, 139 bp, synthetic construct
  source 1..139: mol_type = other DNA
tggggaagggcatgcttttggggaagggcatgatcttggggaagggcatacgcttggggaagggcatgccgcttggggaagggcatgcttttggggaagggcatgatcttggggaagggcatacgcttggggaagggca

SEQ ID NO: 6259 - DNA, 139 bp, synthetic construct
  source 1..139: mol_type = other DNA
tgcccttccccatgcttttgcccttccccatgatcttgcccttccccatacgcttgcccttccccatgccgcttgcccttccccatgcttttgcccttccccatgatcttgcccttccccatacgcttgcccttcccca

SEQ ID NO: 6260 - DNA, 139 bp, synthetic construct
  source 1..139: mol_type = other DNA
tggggaagggcctgcttttggggaagggcctgatcttggggaagggcctacgcttggggaagggcctgccgcttggggaagggcctgcttttggggaagggcctgatcttggggaagggcctacgcttggggaagggcc

SEQ ID NO: 6261 - DNA, 139 bp, synthetic construct
  source 1..139: mol_type = other DNA
ggcccttccccatgctttggcccttccccatgatctggcccttccccatacgctggcccttccccatgccgctggcccttccccatgctttggcccttccccatgatctggcccttccccatacgctggcccttcccca

SEQ ID NO: 6262 - DNA, 140 bp, synthetic construct
  source 1..140: mol_type = other DNA
aagtggtgctttaagtggtgatctaagtggtacgctaagtggtgccgctaagtggtgctttaagtggtgatctaagtggtacgctaagtggtgccgctaagtggtgctttaagtggtgatctaagtggtacgctaagtgg

SEQ ID NO: 6263 - DNA, 140 bp, synthetic construct
  source 1..140: mol_type = other DNA
ccactttgctttccactttgatctccactttacgctccactttgccgctccactttgctttccactttgatctccactttacgctccactttgccgctccactttgctttccactttgatctccactttacgctccactt

SEQ ID NO: 6264 - DNA, 140 bp, synthetic construct
  source 1..140: mol_type = other DNA
aagtgctgctttaagtgctgatctaagtgctacgctaagtgctgccgctaagtgctgctttaagtgctgatctaagtgctacgctaagtgctgccgctaagtgctgctttaagtgctgatctaagtgctacgctaagtgc

SEQ ID NO: 6265 - DNA, 140 bp, synthetic construct
  source 1..140: mol_type = other DNA
gcactttgctttgcactttgatctgcactttacgctgcactttgccgctgcactttgctttgcactttgatctgcactttacgctgcactttgccgctgcactttgctttgcactttgatctgcactttacgctgcactt

SEQ ID NO: 6266 - DNA, 139 bp, synthetic construct
  source 1..139: mol_type = other DNA
agataaccatcttgctttagataaccatcttgatctagataaccatcttacgctagataaccatcttgccgctagataaccatcttgctttagataaccatcttgatctagataaccatcttacgctagataaccatct

SEQ ID NO: 6267 - DNA, 139 bp, synthetic construct
  source 1..139: mol_type = other DNA
agatggttatcttgctttagatggttatcttgatctagatggttatcttacgctagatggttatcttgccgctagatggttatcttgctttagatggttatcttgatctagatggttatcttacgctagatggttatct

SEQ ID NO: 6268 - DNA, 139 bp, synthetic construct
  source 1..139: mol_type = other DNA
agataagcatcttgctttagataagcatcttgatctagataagcatcttacgctagataagcatcttgccgctagataagcatcttgctttagataagcatcttgatctagataagcatcttacgctagataagcatct

SEQ ID NO: 6269 - DNA, 139 bp, synthetic construct
  source 1..139: mol_type = other DNA
agatgcttatcttgctttagatgcttatcttgatctagatgcttatcttacgctagatgcttatcttgccgctagatgcttatcttgctttagatgcttatcttgatctagatgcttatcttacgctagatgcttatct

SEQ ID NO: 6270 - DNA, 139 bp, synthetic construct
  source 1..139: mol_type = other DNA
agataatcatcttgctttagataatcatcttgatctagataatcatcttacgctagataatcatcttgccgctagataatcatcttgctttagataatcatcttgatctagataatcatcttacgctagataatcatct

SEQ ID NO: 6271 - DNA, 139 bp, synthetic construct
  source 1..139: mol_type = other DNA
agatgattatcttgctttagatgattatcttgatctagatgattatcttacgctagatgattatcttgccgctagatgattatcttgctttagatgattatcttgatctagatgattatcttacgctagatgattatct

SEQ ID NO: 6272 - DNA, 139 bp, synthetic construct
  source 1..139: mol_type = other DNA
agattaccatcttgctttagattaccatcttgatctagattaccatcttacgctagattaccatcttgccgctagattaccatcttgctttagattaccatcttgatctagattaccatcttacgctagattaccatct

SEQ ID NO: 6273 - DNA, 139 bp, synthetic construct
  source 1..139: mol_type = other DNA
agatggtaatcttgctttagatggtaatcttgatctagatggtaatcttacgctagatggtaatcttgccgctagatggtaatcttgctttagatggtaatcttgatctagatggtaatcttacgctagatggtaatct

SEQ ID NO: 6274 - DNA, 139 bp, synthetic construct
  source 1..139: mol_type = other DNA
agattagcatcttgctttagattagcatcttgatctagattagcatcttacgctagattagcatcttgccgctagattagcatcttgctttagattagcatcttgatctagattagcatcttacgctagattagcatct

SEQ ID NO: 6275 - DNA, 139 bp, synthetic construct
  source 1..139: mol_type = other DNA
agatgctaatcttgctttagatgctaatcttgatctagatgctaatcttacgctagatgctaatcttgccgctagatgctaatcttgctttagatgctaatcttgatctagatgctaatcttacgctagatgctaatct

SEQ ID NO: 6276 - DNA, 139 bp, synthetic construct
  source 1..139: mol_type = other DNA
agattatcatcttgctttagattatcatcttgatctagattatcatcttacgctagattatcatcttgccgctagattatcatcttgctttagattatcatcttgatctagattatcatcttacgctagattatcatct

SEQ ID NO: 6277 - DNA, 139 bp, synthetic construct
  source 1..139: mol_type = other DNA
agatgataatcttgctttagatgataatcttgatctagatgataatcttacgctagatgataatcttgccgctagatgataatcttgctttagatgataatcttgatctagatgataatcttacgctagatgataatct

SEQ ID NO: 6278 - DNA, 140 bp, synthetic construct
  source 1..140: mol_type = other DNA
ctcccgtgctttctcccgtgatctctcccgtacgctctcccgtgccgctctcccgtgctttctcccgtgatctctcccgtacgctctcccgtgccgctctcccgtgctttctcccgtgatctctcccgtacgctctcccg

SEQ ID NO: 6279 - DNA, 140 bp, synthetic construct
  source 1..140: mol_type = other DNA
cgggagtgctttcgggagtgatctcgggagtacgctcgggagtgccgctcgggagtgctttcgggagtgatctcgggagtacgctcgggagtgccgctcgggagtgctttcgggagtgatctcgggagtacgctcgggag

SEQ ID NO: 6280 - DNA, 140 bp, synthetic construct
  source 1..140: mol_type = other DNA
ctcccctgctttctcccctgatctctcccctacgctctcccctgccgctctcccctgctttctcccctgatctctcccctacgctctcccctgccgctctcccctgctttctcccctgatctctcccctacgctctcccc

SEQ ID NO: 6281 - DNA, 140 bp, synthetic construct
  source 1..140: mol_type = other DNA
ggggagtgctttggggagtgatctggggagtacgctggggagtgccgctggggagtgctttggggagtgatctggggagtacgctggggagtgccgctggggagtgctttggggagtgatctggggagtacgctggggag

SEQ ID NO: 6282 - DNA, 139 bp, synthetic construct
  source 1..139: mol_type = other DNA
tttctgctgatcttttctgctacgcttttctgctgccgcttttctgctgcttttttctgctgatcttttctgctacgcttttctgctgccgcttttctgctgcttttttctgctgatcttttctgctacgcttttctgc

SEQ ID NO: 6283 - DNA, 139 bp, synthetic construct
  source 1..139: mol_type = other DNA
gcagaaatgatctgcagaaatacgctgcagaaatgccgctgcagaaatgctttgcagaaatgatctgcagaaatacgctgcagaaatgccgctgcagaaatgctttgcagaaatgatctgcagaaatacgctgcagaaa

SEQ ID NO: 6284 - DNA, 125 bp, synthetic construct
  source 1..125: mol_type = other DNA
actgctgagtcagcagattctgccgctactgctgagtcagcagattctgctttactgctgagtcagcagattctgatctactgctgagtcagcagattctacgctactgctgagtcagcagattc

SEQ ID NO: 6285 - DNA, 125 bp, synthetic construct
  source 1..125: mol_type = other DNA
gaatctgctgactcagcagttgccgctgaatctgctgactcagcagttgctttgaatctgctgactcagcagttgatctgaatctgctgactcagcagttacgctgaatctgctgactcagcagt

SEQ ID NO: 6286 - DNA, 125 bp, synthetic construct
  source 1..125: mol_type = other DNA
actgctgagtcagcagattttgccgctactgctgagtcagcagattttgctttactgctgagtcagcagattttgatctactgctgagtcagcagattttacgctactgctgagtcagcagattt

SEQ ID NO: 6287 - DNA, 125 bp, synthetic construct
  source 1..125: mol_type = other DNA
aaatctgctgactcagcagttgccgctaaatctgctgactcagcagttgctttaaatctgctgactcagcagttgatctaaatctgctgactcagcagttacgctaaatctgctgactcagcagt

SEQ ID NO: 6288 - DNA, 125 bp, synthetic construct
  source 1..125: mol_type = other DNA
actgctgagtcagcagtttctgccgctactgctgagtcagcagtttctgctttactgctgagtcagcagtttctgatctactgctgagtcagcagtttctacgctactgctgagtcagcagtttc

SEQ ID NO: 6289 - DNA, 125 bp, synthetic construct
  source 1..125: mol_type = other DNA
gaaactgctgactcagcagttgccgctgaaactgctgactcagcagttgctttgaaactgctgactcagcagttgatctgaaactgctgactcagcagttacgctgaaactgctgactcagcagt

SEQ ID NO: 6290 - DNA, 125 bp, synthetic construct
  source 1..125: mol_type = other DNA
actgctgagtcagcagtttttgccgctactgctgagtcagcagtttttgctttactgctgagtcagcagtttttgatctactgctgagtcagcagtttttacgctactgctgagtcagcagtttt

SEQ ID NO: 6291 - DNA, 125 bp, synthetic construct
  source 1..125: mol_type = other DNA
aaaactgctgactcagcagttgccgctaaaactgctgactcagcagttgctttaaaactgctgactcagcagttgatctaaaactgctgactcagcagttacgctaaaactgctgactcagcagt

SEQ ID NO: 6292 - DNA, 125 bp, synthetic construct
  source 1..125: mol_type = other DNA
actgctgactcagcagattctgccgctactgctgactcagcagattctgctttactgctgactcagcagattctgatctactgctgactcagcagattctacgctactgctgactcagcagattc

SEQ ID NO: 6293 - DNA, 125 bp, synthetic construct
  source 1..125: mol_type = other DNA
gaatctgctgagtcagcagttgccgctgaatctgctgagtcagcagttgctttgaatctgctgagtcagcagttgatctgaatctgctgagtcagcagttacgctgaatctgctgagtcagcagt

SEQ ID NO: 6294 - DNA, 125 bp, synthetic construct
  source 1..125: mol_type = other DNA
actgctgactcagcagattttgccgctactgctgactcagcagattttgctttactgctgactcagcagattttgatctactgctgactcagcagattttacgctactgctgactcagcagattt

SEQ ID NO: 6295 - DNA, 125 bp, synthetic construct
  source 1..125: mol_type = other DNA
aaatctgctgagtcagcagttgccgctaaatctgctgagtcagcagttgctttaaatctgctgagtcagcagttgatctaaatctgctgagtcagcagttacgctaaatctgctgagtcagcagt

SEQ ID NO: 6296 - DNA, 125 bp, synthetic construct
  source 1..125: mol_type = other DNA
actgctgactcagcagtttctgccgctactgctgactcagcagtttctgctttactgctgactcagcagtttctgatctactgctgactcagcagtttctacgctactgctgactcagcagtttc

SEQ ID NO: 6297 - DNA, 125 bp, synthetic construct
  source 1..125: mol_type = other DNA
gaaactgctgagtcagcagttgccgctgaaactgctgagtcagcagttgctttgaaactgctgagtcagcagttgatctgaaactgctgagtcagcagttacgctgaaactgctgagtcagcagt

SEQ ID NO: 6298 - DNA, 125 bp, synthetic construct
  source 1..125: mol_type = other DNA
actgctgactcagcagtttttgccgctactgctgactcagcagtttttgctttactgctgactcagcagtttttgatctactgctgactcagcagtttttacgctactgctgactcagcagtttt

SEQ ID NO: 6299 - DNA, 125 bp, synthetic construct
  source 1..125: mol_type = other DNA
aaaactgctgagtcagcagttgccgctaaaactgctgagtcagcagttgctttaaaactgctgagtcagcagttgatctaaaactgctgagtcagcagttacgctaaaactgctgagtcagcagt

SEQ ID NO: 6300 - DNA, 125 bp, synthetic construct
  source 1..125: mol_type = other DNA
tctgctgagtcagcagattctgccgcttctgctgagtcagcagattctgcttttctgctgagtcagcagattctgatcttctgctgagtcagcagattctacgcttctgctgagtcagcagattc

SEQ ID NO: 6301 - DNA, 125 bp, synthetic construct
  source 1..125: mol_type = other DNA
gaatctgctgactcagcagatgccgctgaatctgctgactcagcagatgctttgaatctgctgactcagcagatgatctgaatctgctgactcagcagatacgctgaatctgctgactcagcaga

SEQ ID NO: 6302 - DNA, 125 bp, synthetic construct
  source 1..125: mol_type = other DNA
tctgctgagtcagcagattttgccgcttctgctgagtcagcagattttgcttttctgctgagtcagcagattttgatcttctgctgagtcagcagattttacgcttctgctgagtcagcagattt

SEQ ID NO: 6303 - DNA, 125 bp, synthetic construct
  source 1..125: mol_type = other DNA
aaatctgctgactcagcagatgccgctaaatctgctgactcagcagatgctttaaatctgctgactcagcagatgatctaaatctgctgactcagcagatacgctaaatctgctgactcagcaga

SEQ ID NO: 6304 - DNA, 125 bp, synthetic construct
  source 1..125: mol_type = other DNA
tctgctgagtcagcagtttctgccgcttctgctgagtcagcagtttctgcttttctgctgagtcagcagtttctgatcttctgctgagtcagcagtttctacgcttctgctgagtcagcagtttc

SEQ ID NO: 6305 - DNA, 125 bp, synthetic construct
  source 1..125: mol_type = other DNA
gaaactgctgactcagcagatgccgctgaaactgctgactcagcagatgctttgaaactgctgactcagcagatgatctgaaactgctgactcagcagatacgctgaaactgctgactcagcaga

SEQ ID NO: 6306 - DNA, 125 bp, synthetic construct
  source 1..125: mol_type = other DNA
tctgctgagtcagcagtttttgccgcttctgctgagtcagcagtttttgcttttctgctgagtcagcagtttttgatcttctgctgagtcagcagtttttacgcttctgctgagtcagcagtttt

SEQ ID NO: 6307 - DNA, 125 bp, synthetic construct
  source 1..125: mol_type = other DNA
aaaactgctgactcagcagatgccgctaaaactgctgactcagcagatgctttaaaactgctgactcagcagatgatctaaaactgctgactcagcagatacgctaaaactgctgactcagcaga

SEQ ID NO: 6308 - DNA, 125 bp, synthetic construct
  source 1..125: mol_type = other DNA
tctgctgactcagcagattctgccgcttctgctgactcagcagattctgcttttctgctgactcagcagattctgatcttctgctgactcagcagattctacgcttctgctgactcagcagattc

SEQ ID NO: 6309 - DNA, 125 bp, synthetic construct
  source 1..125: mol_type = other DNA
gaatctgctgagtcagcagatgccgctgaatctgctgagtcagcagatgctttgaatctgctgagtcagcagatgatctgaatctgctgagtcagcagatacgctgaatctgctgagtcagcaga

SEQ ID NO: 6310 - DNA, 125 bp, synthetic construct
  source 1..125: mol_type = other DNA
tctgctgactcagcagattttgccgcttctgctgactcagcagattttgcttttctgctgactcagcagattttgatcttctgctgactcagcagattttacgcttctgctgactcagcagattt

SEQ ID NO: 6311 - DNA, 125 bp, synthetic construct
  source 1..125: mol_type = other DNA
aaatctgctgagtcagcagatgccgctaaatctgctgagtcagcagatgctttaaatctgctgagtcagcagatgatctaaatctgctgagtcagcagatacgctaaatctgctgagtcagcaga

SEQ ID NO: 6312 - DNA, 125 bp, synthetic construct
  source 1..125: mol_type = other DNA
tctgctgactcagcagtttctgccgcttctgctgactcagcagtttctgcttttctgctgactcagcagtttctgatcttctgctgactcagcagtttctacgcttctgctgactcagcagtttc

SEQ ID NO: 6313 - DNA, 125 bp, synthetic construct
  source 1..125: mol_type = other DNA
gaaactgctgagtcagcagatgccgctgaaactgctgagtcagcagatgctttgaaactgctgagtcagcagatgatctgaaactgctgagtcagcagatacgctgaaactgctgagtcagcaga

SEQ ID NO: 6314 - DNA, 125 bp, synthetic construct
  source 1..125: mol_type = other DNA
tctgctgactcagcagtttttgccgcttctgctgactcagcagtttttgcttttctgctgactcagcagtttttgatcttctgctgactcagcagtttttacgcttctgctgactcagcagtttt

SEQ ID NO: 6315 - DNA, 125 bp, synthetic construct
  source 1..125: mol_type = other DNA
aaaactgctgagtcagcagatgccgctaaaactgctgagtcagcagatgctttaaaactgctgagtcagcagatgatctaaaactgctgagtcagcagatacgctaaaactgctgagtcagcaga

SEQ ID NO: 6316 - DNA, 149 bp, synthetic construct; identical to SEQ ID NO: 5748
  source 1..149: mol_type = other DNA

SEQ ID NO: 6317 - DNA, 149 bp, synthetic construct; identical to SEQ ID NO: 5749
  source 1..149: mol_type = other DNA

SEQ ID NO: 6318 - DNA, 125 bp, synthetic construct
  source 1..125: mol_type = other DNA
agtatcgctgcaacgaaacttgccgctagtatcgctgcaacgaaacttgctttagtatcgctgcaacgaaacttgatctagtatcgctgcaacgaaacttacgctagtatcgctgcaacgaaact

SEQ ID NO: 6319 - DNA, 125 bp, synthetic construct
  source 1..125: mol_type = other DNA
agtttcgttgcagcgatacttgccgctagtttcgttgcagcgatacttgctttagtttcgttgcagcgatacttgatctagtttcgttgcagcgatacttacgctagtttcgttgcagcgatact

SEQ ID NO: 6320 - DNA, 125 bp, synthetic construct
  source 1..125: mol_type = other DNA
agtatcgctgcaacgatacttgccgctagtatcgctgcaacgatacttgctttagtatcgctgcaacgatacttgatctagtatcgctgcaacgatacttacgctagtatcgctgcaacgatact

SEQ ID NO: 6321 - DNA, 125 bp, synthetic construct
  source 1..125: mol_type = other DNA
agtatcgttgcagcgatacttgccgctagtatcgttgcagcgatacttgctttagtatcgttgcagcgatacttgatctagtatcgttgcagcgatacttacgctagtatcgttgcagcgatact

SEQ ID NO: 6322 - DNA, 125 bp, synthetic construct
  source 1..125: mol_type = other DNA
agtatcgctgcaatgaaacttgccgctagtatcgctgcaatgaaacttgctttagtatcgctgcaatgaaacttgatctagtatcgctgcaatgaaacttacgctagtatcgctgcaatgaaact

SEQ ID NO: 6323 - DNA, 125 bp, synthetic construct
  source 1..125: mol_type = other DNA
agtttcattgcagcgatacttgccgctagtttcattgcagcgatacttgctttagtttcattgcagcgatacttgatctagtttcattgcagcgatacttacgctagtttcattgcagcgatact

SEQ ID NO: 6324 - DNA, 125 bp, synthetic construct
  source 1..125: mol_type = other DNA
agtatcgctgcaatgatacttgccgctagtatcgctgcaatgatacttgctttagtatcgctgcaatgatacttgatctagtatcgctgcaatgatacttacgctagtatcgctgcaatgatact

SEQ ID NO: 6325 - DNA, 125 bp, synthetic construct
  source 1..125: mol_type = other DNA
agtatcattgcagcgatacttgccgctagtatcattgcagcgatacttgctttagtatcattgcagcgatacttgatctagtatcattgcagcgatacttacgctagtatcattgcagcgatact

SEQ ID NO: 6326 - DNA, 125 bp, synthetic construct
  source 1..125: mol_type = other DNA
agtttcgctgcaacgaaacttgccgctagtttcgctgcaacgaaacttgctttagtttcgctgcaacgaaacttgatctagtttcgctgcaacgaaacttacgctagtttcgctgcaacgaaact

SEQ ID NO: 6327 - DNA, 125 bp, synthetic construct
  source 1..125: mol_type = other DNA
agtttcgttgcagcgaaacttgccgctagtttcgttgcagcgaaacttgctttagtttcgttgcagcgaaacttgatctagtttcgttgcagcgaaacttacgctagtttcgttgcagcgaaact

SEQ ID NO: 6328 - DNA, 125 bp, synthetic construct
  source 1..125: mol_type = other DNA
agtttcgctgcaacgatacttgccgctagtttcgctgcaacgatacttgctttagtttcgctgcaacgatacttgatctagtttcgctgcaacgatacttacgctagtttcgctgcaacgatact

SEQ ID NO: 6329 - DNA, 125 bp, synthetic construct
  source 1..125: mol_type = other DNA
agtatcgttgcagcgaaacttgccgctagtatcgttgcagcgaaacttgctttagtatcgttgcagcgaaacttgatctagtatcgttgcagcgaaacttacgctagtatcgttgcagcgaaact

SEQ ID NO: 6330 - DNA, 125 bp, synthetic construct
  source 1..125: mol_type = other DNA
agtttcgctgcaatgaaacttgccgctagtttcgctgcaatgaaacttgctttagtttcgctgcaatgaaacttgatctagtttcgctgcaatgaaacttacgctagtttcgctgcaatgaaact

SEQ ID NO: 6331 - DNA, 125 bp, synthetic construct
  source 1..125: mol_type = other DNA
agtttcattgcagcgaaacttgccgctagtttcattgcagcgaaacttgctttagtttcattgcagcgaaacttgatctagtttcattgcagcgaaacttacgctagtttcattgcagcgaaact

SEQ ID NO: 6332 - DNA, 125 bp, synthetic construct
  source 1..125: mol_type = other DNA
agtttcgctgcaatgatacttgccgctagtttcgctgcaatgatacttgctttagtttcgctgcaatgatacttgatctagtttcgctgcaatgatacttacgctagtttcgctgcaatgatact

SEQ ID NO: 6333 - DNA, 125 bp, synthetic construct
  source 1..125: mol_type = other DNA
agtatcattgcagcgaaacttgccgctagtatcattgcagcgaaacttgctttagtatcattgcagcgaaacttgatctagtatcattgcagcgaaacttacgctagtatcattgcagcgaaact

SEQ ID NO: 6334 - DNA, 125 bp, synthetic construct
  source 1..125: mol_type = other DNA
ggtatcgctgcaacgaaacttgccgctggtatcgctgcaacgaaacttgctttggtatcgctgcaacgaaacttgatctggtatcgctgcaacgaaacttacgctggtatcgctgcaacgaaact

SEQ ID NO: 6335 - DNA, 125 bp, synthetic construct
  source 1..125: mol_type = other DNA
agtttcgttgcagcgatacctgccgctagtttcgttgcagcgatacctgctttagtttcgttgcagcgatacctgatctagtttcgttgcagcgatacctacgctagtttcgttgcagcgatacc

SEQ ID NO: 6336 - DNA, 125 bp, synthetic construct
  source 1..125: mol_type = other DNA
ggtatcgctgcaacgatacttgccgctggtatcgctgcaacgatacttgctttggtatcgctgcaacgatacttgatctggtatcgctgcaacgatacttacgctggtatcgctgcaacgatact

SEQ ID NO: 6337 - DNA, 125 bp, synthetic construct
  source 1..125: mol_type = other DNA
agtatcgttgcagcgatacctgccgctagtatcgttgcagcgatacctgctttagtatcgttgcagcgatacctgatctagtatcgttgcagcgatacctacgctagtatcgttgcagcgatacc

SEQ ID NO: 6338 - DNA, 125 bp, synthetic construct
  source 1..125: mol_type = other DNA
ggtatcgctgcaatgaaacttgccgctggtatcgctgcaatgaaacttgctttggtatcgctgcaatgaaacttgatctggtatcgctgcaatgaaacttacgctggtatcgctgcaatgaaact

SEQ ID NO: 6339 - DNA, 125 bp, synthetic construct
  source 1..125: mol_type = other DNA
agtttcattgcagcgatacctgccgctagtttcattgcagcgatacctgctttagtttcattgcagcgatacctgatctagtttcattgcagcgatacctacgctagtttcattgcagcgatacc

SEQ ID NO: 6340 - DNA, 125 bp, synthetic construct
  source 1..125: mol_type = other DNA
ggtatcgctgcaatgatacttgccgctggtatcgctgcaatgatacttgctttggtatcgctgcaatgatacttgatctggtatcgctgcaatgatacttacgctggtatcgctgcaatgatact

SEQ ID NO: 6341 - DNA, 125 bp, synthetic construct
  source 1..125: mol_type = other DNA
agtatcattgcagcgatacctgccgctagtatcattgcagcgatacctgctttagtatcattgcagcgatacctgatctagtatcattgcagcgatacctacgctagtatcattgcagcgatacc

SEQ ID NO: 6342 - DNA, 125 bp, synthetic construct
  source 1..125: mol_type = other DNA
ggtttcgctgcaacgaaacttgccgctggtttcgctgcaacgaaacttgctttggtttcgctgcaacgaaacttgatctggtttcgctgcaacgaaacttacgctggtttcgctgcaacgaaact

SEQ ID NO: 6343 - DNA, 125 bp, synthetic construct
  source 1..125: mol_type = other DNA
agtttcgttgcagcgaaacctgccgctagtttcgttgcagcgaaacctgctttagtttcgttgcagcgaaacctgatctagtttcgttgcagcgaaacctacgctagtttcgttgcagcgaaacc

SEQ ID NO: 6344 - DNA, 125 bp, synthetic construct
  source 1..125: mol_type = other DNA
ggtttcgctgcaacgatacttgccgctggtttcgctgcaacgatacttgctttggtttcgctgcaacgatacttgatctggtttcgctgcaacgatacttacgctggtttcgctgcaacgatact

SEQ ID NO: 6345 - DNA, 125 bp, synthetic construct
  source 1..125: mol_type = other DNA
agtatcgttgcagcgaaacctgccgctagtatcgttgcagcgaaacctgctttagtatcgttgcagcgaaacctgatctagtatcgttgcagcgaaacctacgctagtatcgttgcagcgaaacc

SEQ ID NO: 6346 - DNA, 125 bp, synthetic construct
  source 1..125: mol_type = other DNA
ggtttcgctgcaatgaaacttgccgctggtttcgctgcaatgaaacttgctttggtttcgctgcaatgaaacttgatctggtttcgctgcaatgaaacttacgctggtttcgctgcaatgaaact

SEQ ID NO: 6347 - DNA, 125 bp, synthetic construct
  source 1..125: mol_type = other DNA
agtttcattgcagcgaaacctgccgctagtttcattgcagcgaaacctgctttagtttcattgcagcgaaacctgatctagtttcattgcagcgaaacctacgctagtttcattgcagcgaaacc

SEQ ID NO: 6348 - DNA, 125 bp, synthetic construct
  source 1..125: mol_type = other DNA
ggtttcgctgcaatgatacttgccgctggtttcgctgcaatgatacttgctttggtttcgctgcaatgatacttgatctggtttcgctgcaatgatacttacgctggtttcgctgcaatgatact

SEQ ID NO: 6349 - DNA, 125 bp, synthetic construct
  source 1..125: mol_type = other DNA
agtatcattgcagcgaaacctgccgctagtatcattgcagcgaaacctgctttagtatcattgcagcgaaacctgatctagtatcattgcagcgaaacctacgctagtatcattgcagcgaaacc

SEQ ID NO: 6350 - DNA, 149 bp, synthetic construct
  source 1..149: mol_type = other DNA
tgctgagtcagcagaatgatcttgctgagtcagcagaatacgcttgctgagtcagcagaatgccgcttgctgagtcagcagaatgcttttgctgagtcagcagaatgatcttgctgagtcagcagaatacgcttgctgagtcagcagaa

SEQ ID NO: 6351 - DNA, 149 bp, synthetic construct
  source 1..149: mol_type = other DNA
ttctgctgactcagcatgatctttctgctgactcagcatacgctttctgctgactcagcatgccgctttctgctgactcagcatgctttttctgctgactcagcatgatctttctgctgactcagcatacgctttctgctgactcagca

SEQ ID NO: 6352 - DNA, 149 bp, synthetic construct
  source 1..149: mol_type = other DNA
tgctgagtcagcagattgatcttgctgagtcagcagattacgcttgctgagtcagcagattgccgcttgctgagtcagcagattgcttttgctgagtcagcagattgatcttgctgagtcagcagattacgcttgctgagtcagcagat

SEQ ID NO: 6353 - DNA, 149 bp, synthetic construct
  source 1..149: mol_type = other DNA
atctgctgactcagcatgatctatctgctgactcagcatacgctatctgctgactcagcatgccgctatctgctgactcagcatgctttatctgctgactcagcatgatctatctgctgactcagcatacgctatctgctgactcagca

SEQ ID NO: 6354 - DNA, 149 bp, synthetic construct
  source 1..149: mol_type = other DNA
tgctgagtcagcagtatgatcttgctgagtcagcagtatacgcttgctgagtcagcagtatgccgcttgctgagtcagcagtatgcttttgctgagtcagcagtatgatcttgctgagtcagcagtatacgcttgctgagtcagcagta

SEQ ID NO: 6355 - DNA, 149 bp, synthetic construct
  source 1..149: mol_type = other DNA
tactgctgactcagcatgatcttactgctgactcagcatacgcttactgctgactcagcatgccgcttactgctgactcagcatgcttttactgctgactcagcatgatcttactgctgactcagcatacgcttactgctgactcagca

SEQ ID NO: 6356 - DNA, 149 bp, synthetic construct
  source 1..149: mol_type = other DNA
tgctgagtcagcagtttgatcttgctgagtcagcagtttacgcttgctgagtcagcagtttgccgcttgctgagtcagcagtttgcttttgctgagtcagcagtttgatcttgctgagtcagcagtttacgcttgctgagtcagcagtt

SEQ ID NO: 6357 - DNA, 149 bp, synthetic construct
  source 1..149: mol_type = other DNA
aactgctgactcagcatgatctaactgctgactcagcatacgctaactgctgactcagcatgccgctaactgctgactcagcatgctttaactgctgactcagcatgatctaactgctgactcagcatacgctaactgctgactcagca

SEQ ID NO: 6358 - DNA, 149 bp, synthetic construct
  source 1..149: mol_type = other DNA
tgctgactcagcagaatgatcttgctgactcagcagaatacgcttgctgactcagcagaatgccgcttgctgactcagcagaatgcttttgctgactcagcagaatgatcttgctgactcagcagaatacgcttgctgactcagcagaa

SEQ ID NO: 6359 - DNA, 149 bp, synthetic construct
  source 1..149: mol_type = other DNA
ttctgctgagtcagcatgatctttctgctgagtcagcatacgctttctgctgagtcagcatgccgctttctgctgagtcagcatgctttttctgctgagtcagcatgatctttctgctgagtcagcatacgctttctgctgagtcagca

SEQ ID NO: 6360 - DNA, 149 bp, synthetic construct
  source 1..149: mol_type = other DNA
tgctgactcagcagattgatcttgctgactcagcagattacgcttgctgactcagcagattgccgcttgctgactcagcagattgcttttgctgactcagcagattgatcttgctgactcagcagattacgcttgctgactcagcagat

SEQ ID NO: 6361 - DNA, 149 bp, synthetic construct
  source 1..149: mol_type = other DNA
atctgctgagtcagcatgatctatctgctgagtcagcatacgctatctgctgagtcagcatgccgctatctgctgagtcagcatgctttatctgctgagtcagcatgatctatctgctgagtcagcatacgctatctgctgagtcagca

SEQ ID NO: 6362 - DNA, 149 bp, synthetic construct
  source 1..149: mol_type = other DNA
tgctgactcagcagtatgatcttgctgactcagcagtatacgcttgctgactcagcagtatgccgcttgctgactcagcagtatgcttttgctgactcagcagtatgatcttgctgactcagcagtatacgcttgctgactcagcagta

SEQ ID NO: 6363 - DNA, 149 bp, synthetic construct
  source 1..149: mol_type = other DNA
tactgctgagtcagcatgatcttactgctgagtcagcatacgcttactgctgagtcagcatgccgcttactgctgagtcagcatgcttttactgctgagtcagcatgatcttactgctgagtcagcatacgcttactgctgagtcagca

SEQ ID NO: 6364 - DNA, 149 bp, synthetic construct
  source 1..149: mol_type = other DNA
tgctgactcagcagtttgatcttgctgactcagcagtttacgcttgctgactcagcagtttgccgcttgctgactcagcagtttgcttttgctgactcagcagtttgatcttgctgactcagcagtttacgcttgctgactcagcagtt

SEQ ID NO: 6365 - DNA, 149 bp, synthetic construct
  source 1..149: mol_type = other DNA
aactgctgagtcagcatgatctaactgctgagtcagcatacgctaactgctgagtcagcatgccgctaactgctgagtcagcatgctttaactgctgagtcagcatgatctaactgctgagtcagcatacgctaactgctgagtcagca

SEQ ID NO: 6366 - DNA, 140 bp, synthetic construct
  source 1..140: mol_type = other DNA
aacagctgtctgccgctaacagctgtctgctttaacagctgtctgatctaacagctgtctacgctaacagctgtctgccgctaacagctgtctgctttaacagctgtctgatctaacagctgtctacgctaacagctgtc

SEQ ID NO: 6367 - DNA, 140 bp, synthetic construct
  source 1..140: mol_type = other DNA
gacagctgtttgccgctgacagctgtttgctttgacagctgtttgatctgacagctgtttacgctgacagctgtttgccgctgacagctgtttgctttgacagctgtttgatctgacagctgtttacgctgacagctgtt

SEQ ID NO: 6368 - DNA, 139 bp, synthetic construct
  source 1..139: mol_type = other DNA
atgctgagtcattgctttatgctgagtcattgatctatgctgagtcattacgctatgctgagtcattgccgctatgctgagtcattgctttatgctgagtcattgatctatgctgagtcattacgctatgctgagtcat

SEQ ID NO: 6369 - DNA, 139 bp, synthetic construct
  source 1..139: mol_type = other DNA
atgactcagcattgctttatgactcagcattgatctatgactcagcattacgctatgactcagcattgccgctatgactcagcattgctttatgactcagcattgatctatgactcagcattacgctatgactcagcat

SEQ ID NO: 6370 - DNA, 139 bp, synthetic construct
  source 1..139: mol_type = other DNA
ctgctgagtcattgctttctgctgagtcattgatctctgctgagtcattacgctctgctgagtcattgccgctctgctgagtcattgctttctgctgagtcattgatctctgctgagtcattacgctctgctgagtcat

SEQ ID NO: 6371 - DNA, 139 bp, synthetic construct
  source 1..139: mol_type = other DNA
atgactcagcagtgctttatgactcagcagtgatctatgactcagcagtacgctatgactcagcagtgccgctatgactcagcagtgctttatgactcagcagtgatctatgactcagcagtacgctatgactcagcag

SEQ ID NO: 6372 - DNA, 139 bp, synthetic construct
  source 1..139: mol_type = other DNA
ttgctgagtcattgctttttgctgagtcattgatctttgctgagtcattacgctttgctgagtcattgccgctttgctgagtcattgctttttgctgagtcattgatctttgctgagtcattacgctttgctgagtcat

SEQ ID NO: 6373 - DNA, 139 bp, synthetic construct
  source 1..139: mol_type = other DNA
atgactcagcaatgctttatgactcagcaatgatctatgactcagcaatacgctatgactcagcaatgccgctatgactcagcaatgctttatgactcagcaatgatctatgactcagcaatacgctatgactcagcaa

SEQ ID NO: 6374 - DNA, 146 bp, synthetic construct
  source 1..146: mol_type = other DNA
agcagctggtacgctagcagctggtgccgctagcagctggtgctttagcagctggtgatctagcagctggtacgctagcagctggtgccgctagcagctggtgctttagcagctggtgatctagcagctggtacgctagcagctgg

SEQ ID NO: 6375 - DNA, 146 bp, synthetic construct
  source 1..146: mol_type = other DNA
ccagctgcttacgctccagctgcttgccgctccagctgcttgctttccagctgcttgatctccagctgcttacgctccagctgcttgccgctccagctgcttgctttccagctgcttgatctccagctgcttacgctccagctgct

SEQ ID NO: 6376 - DNA, 146 bp, synthetic construct
  source 1..146: mol_type = other DNA
agcagctgctacgctagcagctgctgccgctagcagctgctgctttagcagctgctgatctagcagctgctacgctagcagctgctgccgctagcagctgctgctttagcagctgctgatctagcagctgctacgctagcagctgc

SEQ ID NO: 6377 - DNA, 146 bp, synthetic construct
  source 1..146: mol_type = other DNA
gcagctgcttacgctgcagctgcttgccgctgcagctgcttgctttgcagctgcttgatctgcagctgcttacgctgcagctgcttgccgctgcagctgcttgctttgcagctgcttgatctgcagctgcttacgctgcagctgct

SEQ ID NO: 6378 - DNA, 142 bp, synthetic construct
  source 1..142: mol_type = other DNA
taggtttctgttatctgatcttaggtttctgttatctacgcttaggtttctgttatctgccgcttaggtttctgttatctgcttttaggtttctgttatctgatcttaggtttctgttatctacgcttaggtttctgttatc

SEQ ID NO: 6379 - DNA, 142 bp, synthetic construct
  source 1..142: mol_type = other DNA
gataacagaaacctatgatctgataacagaaacctatacgctgataacagaaacctatgccgctgataacagaaacctatgctttgataacagaaacctatgatctgataacagaaacctatacgctgataacagaaaccta

SEQ ID NO: 6380 - DNA, 142 bp, synthetic construct
  source 1..142: mol_type = other DNA
taggtttctgttatttgatcttaggtttctgttatttacgcttaggtttctgttatttgccgcttaggtttctgttatttgcttttaggtttctgttatttgatcttaggtttctgttatttacgcttaggtttctgttatt

SEQ ID NO: 6381 - DNA, 142 bp, synthetic construct
  source 1..142: mol_type = other DNA
aataacagaaacctatgatctaataacagaaacctatacgctaataacagaaacctatgccgctaataacagaaacctatgctttaataacagaaacctatgatctaataacagaaacctatacgctaataacagaaaccta

SEQ ID NO: 6382 - DNA, 142 bp, synthetic construct
  source 1..142: mol_type = other DNA
tgggtttctgttatctgatcttgggtttctgttatctacgcttgggtttctgttatctgccgcttgggtttctgttatctgcttttgggtttctgttatctgatcttgggtttctgttatctacgcttgggtttctgttatc

SEQ ID NO: 6383 - DNA, 142 bp, synthetic construct
  source 1..142: mol_type = other DNA
gataacagaaacccatgatctgataacagaaacccatacgctgataacagaaacccatgccgctgataacagaaacccatgctttgataacagaaacccatgatctgataacagaaacccatacgctgataacagaaaccca

SEQ ID NO: 6384 - DNA, 142 bp, synthetic construct
  source 1..142: mol_type = other DNA
tgggtttctgttatttgatcttgggtttctgttatttacgcttgggtttctgttatttgccgcttgggtttctgttatttgcttttgggtttctgttatttgatcttgggtttctgttatttacgcttgggtttctgttatt

SEQ ID NO: 6385 - DNA, 142 bp, synthetic construct
  source 1..142: mol_type = other DNA
aataacagaaacccatgatctaataacagaaacccatacgctaataacagaaacccatgccgctaataacagaaacccatgctttaataacagaaacccatgatctaataacagaaacccatacgctaataacagaaaccca

SEQ ID NO: 6386 - DNA, 140 bp, synthetic construct
  source 1..140: mol_type = other DNA
cccacccaactgccgctcccacccaactgctttcccacccaactgatctcccacccaactacgctcccacccaactgccgctcccacccaactgctttcccacccaactgatctcccacccaactacgctcccacccaac

SEQ ID NO: 6387 - DNA, 140 bp, synthetic construct
  source 1..140: mol_type = other DNA
gttgggtgggtgccgctgttgggtgggtgctttgttgggtgggtgatctgttgggtgggtacgctgttgggtgggtgccgctgttgggtgggtgctttgttgggtgggtgatctgttgggtgggtacgctgttgggtggg

SEQ ID NO: 6388 - DNA, 140 bp, synthetic construct
  source 1..140: mol_type = other DNA
ccctcccaactgccgctccctcccaactgctttccctcccaactgatctccctcccaactacgctccctcccaactgccgctccctcccaactgctttccctcccaactgatctccctcccaactacgctccctcccaac

SEQ ID NO: 6389 - DNA, 140 bp, synthetic construct
  source 1..140: mol_type = other DNA
gttgggagggtgccgctgttgggagggtgctttgttgggagggtgatctgttgggagggtacgctgttgggagggtgccgctgttgggagggtgctttgttgggagggtgatctgttgggagggtacgctgttgggaggg

SEQ ID NO: 6390 - DNA, 135 bp, synthetic construct
  source 1..135: mol_type = other DNA
atgactcagcacattgatctatgactcagcacattacgctatgactcagcacattgccgctatgactcagcacattgctttatgactcagcacattgatctatgactcagcacattacgctatgactcagcacat

SEQ ID NO: 6391 - DNA, 135 bp, synthetic construct
  source 1..135: mol_type = other DNA
atgtgctgagtcattgatctatgtgctgagtcattacgctatgtgctgagtcattgccgctatgtgctgagtcattgctttatgtgctgagtcattgatctatgtgctgagtcattacgctatgtgctgagtcat

SEQ ID NO: 6392 - DNA, 135 bp, synthetic construct
  source 1..135: mol_type = other DNA
atgactcagcactttgatctatgactcagcactttacgctatgactcagcactttgccgctatgactcagcactttgctttatgactcagcactttgatctatgactcagcactttacgctatgactcagcactt

SEQ ID NO: 6393 - DNA, 135 bp, synthetic construct
  source 1..135: mol_type = other DNA
aagtgctgagtcattgatctaagtgctgagtcattacgctaagtgctgagtcattgccgctaagtgctgagtcattgctttaagtgctgagtcattgatctaagtgctgagtcattacgctaagtgctgagtcat

SEQ ID NO: 6394 - DNA, 149 bp, synthetic construct
  source 1..149: mol_type = other DNA
ccatttcccggaactctgatctccatttcccggaactctacgctccatttcccggaactctgccgctccatttcccggaactctgctttccatttcccggaactctgatctccatttcccggaactctacgctccatttcccggaactc

SEQ ID NO: 6395 - DNA, 149 bp, synthetic construct
  source 1..149: mol_type = other DNA
gagttccgggaaatggtgatctgagttccgggaaatggtacgctgagttccgggaaatggtgccgctgagttccgggaaatggtgctttgagttccgggaaatggtgatctgagttccgggaaatggtacgctgagttccgggaaatgg

SEQ ID NO: 6396 - DNA, 149 bp, synthetic construct
  source 1..149: mol_type = other DNA
tcatttcccggaactctgatcttcatttcccggaactctacgcttcatttcccggaactctgccgcttcatttcccggaactctgcttttcatttcccggaactctgatcttcatttcccggaactctacgcttcatttcccggaactc

SEQ ID NO: 6397 - DNA, 149 bp, synthetic construct
  source 1..149: mol_type = other DNA
gagttccgggaaatgatgatctgagttccgggaaatgatacgctgagttccgggaaatgatgccgctgagttccgggaaatgatgctttgagttccgggaaatgatgatctgagttccgggaaatgatacgctgagttccgggaaatga

SEQ ID NO: 6398 - DNA, 136 bp, synthetic construct
  source 1..136: mol_type = other DNA
tcacctcctacgcttcacctcctgccgcttcacctcctgcttttcacctcctgatcttcacctcctacgcttcacctcctgccgcttcacctcctgcttttcacctcctgatcttcacctcctacgcttcacctcc

SEQ ID NO: 6399 - DNA, 136 bp, synthetic construct
  source 1..136: mol_type = other DNA
ggaggtgatacgctggaggtgatgccgctggaggtgatgctttggaggtgatgatctggaggtgatacgctggaggtgatgccgctggaggtgatgctttggaggtgatgatctggaggtgatacgctggaggtga

SEQ ID NO: 6400 - DNA, 149 bp, synthetic construct
  source 1..149: mol_type = other DNA
gataacagatgtgccgctgataacagatgtgctttgataacagatgtgatctgataacagatgtacgctgataacagatgtgccgctgataacagatgtgctttgataacagatgtgatctgataacagatgtacgctgataacagatg

SEQ ID NO: 6401 - DNA, 149 bp, synthetic construct
  source 1..149: mol_type = other DNA
catctgttatctgccgctcatctgttatctgctttcatctgttatctgatctcatctgttatctacgctcatctgttatctgccgctcatctgttatctgctttcatctgttatctgatctcatctgttatctacgctcatctgttatc

SEQ ID NO: 6402 - DNA, 149 bp, synthetic construct
  source 1..149: mol_type = other DNA
gataacagctgtgccgctgataacagctgtgctttgataacagctgtgatctgataacagctgtacgctgataacagctgtgccgctgataacagctgtgctttgataacagctgtgatctgataacagctgtacgctgataacagctg

SEQ ID NO: 6403 - DNA, 149 bp, synthetic construct
  source 1..149: mol_type = other DNA
cagctgttatctgccgctcagctgttatctgctttcagctgttatctgatctcagctgttatctacgctcagctgttatctgccgctcagctgttatctgctttcagctgttatctgatctcagctgttatctacgctcagctgttatc

SEQ ID NO: 6404 - DNA, 149 bp, synthetic construct
  source 1..149: mol_type = other DNA
gatagcagatgtgccgctgatagcagatgtgctttgatagcagatgtgatctgatagcagatgtacgctgatagcagatgtgccgctgatagcagatgtgctttgatagcagatgtgatctgatagcagatgtacgctgatagcagatg

SEQ ID NO: 6405 - DNA, 149 bp, synthetic construct
  source 1..149: mol_type = other DNA
catctgctatctgccgctcatctgctatctgctttcatctgctatctgatctcatctgctatctacgctcatctgctatctgccgctcatctgctatctgctttcatctgctatctgatctcatctgctatctacgctcatctgctatc

SEQ ID NO: 6406 - DNA, 149 bp, synthetic construct
  source 1..149: mol_type = other DNA
gatagcagctgtgccgctgatagcagctgtgctttgatagcagctgtgatctgatagcagctgtacgctgatagcagctgtgccgctgatagcagctgtgctttgatagcagctgtgatctgatagcagctgtacgctgatagcagctg

SEQ ID NO: 6407 - DNA, 149 bp, synthetic construct
  source 1..149: mol_type = other DNA
cagctgctatctgccgctcagctgctatctgctttcagctgctatctgatctcagctgctatctacgctcagctgctatctgccgctcagctgctatctgctttcagctgctatctgatctcagctgctatctacgctcagctgctatc

SEQ ID NO: 6408 - DNA, 149 bp, synthetic construct
  source 1..149: mol_type = other DNA
ggtaacagatgtgccgctggtaacagatgtgctttggtaacagatgtgatctggtaacagatgtacgctggtaacagatgtgccgctggtaacagatgtgctttggtaacagatgtgatctggtaacagatgtacgctggtaacagatg

SEQ ID NO: 6409 - DNA, 149 bp, synthetic construct
  source 1..149: mol_type = other DNA
catctgttacctgccgctcatctgttacctgctttcatctgttacctgatctcatctgttacctacgctcatctgttacctgccgctcatctgttacctgctttcatctgttacctgatctcatctgttacctacgctcatctgttacc

SEQ ID NO: 6410 - DNA, 149 bp, synthetic construct
  source 1..149: mol_type = other DNA
ggtaacagctgtgccgctggtaacagctgtgctttggtaacagctgtgatctggtaacagctgtacgctggtaacagctgtgccgctggtaacagctgtgctttggtaacagctgtgatctggtaacagctgtacgctggtaacagctg

SEQ ID NO: 6411 - DNA, 149 bp, synthetic construct
  source 1..149: mol_type = other DNA
cagctgttacctgccgctcagctgttacctgctttcagctgttacctgatctcagctgttacctacgctcagctgttacctgccgctcagctgttacctgctttcagctgttacctgatctcagctgttacctacgctcagctgttacc

SEQ ID NO: 6412 - DNA, 149 bp, synthetic construct
  source 1..149: mol_type = other DNA
ggtagcagatgtgccgctggtagcagatgtgctttggtagcagatgtgatctggtagcagatgtacgctggtagcagatgtgccgctggtagcagatgtgctttggtagcagatgtgatctggtagcagatgtacgctggtagcagatg

SEQ ID NO: 6413 - DNA, 149 bp, synthetic construct
  source 1..149: mol_type = other DNA
catctgctacctgccgctcatctgctacctgctttcatctgctacctgatctcatctgctacctacgctcatctgctacctgccgctcatctgctacctgctttcatctgctacctgatctcatctgctacctacgctcatctgctacc

SEQ ID NO: 6414 - DNA, 149 bp, synthetic construct
  source 1..149: mol_type = other DNA
ggtagcagctgtgccgctggtagcagctgtgctttggtagcagctgtgatctggtagcagctgtacgctggtagcagctgtgccgctggtagcagctgtgctttggtagcagctgtgatctggtagcagctgtacgctggtagcagctg

SEQ ID NO: 6415 - DNA, 149 bp, synthetic construct
  source 1..149: mol_type = other DNA
cagctgctacctgccgctcagctgctacctgctttcagctgctacctgatctcagctgctacctacgctcagctgctacctgccgctcagctgctacctgctttcagctgctacctgatctcagctgctacctacgctcagctgctacc

SEQ ID NO: 6416 - DNA, 139 bp, synthetic construct
  source 1..139: mol_type = other DNA
actttcgtttcttgctttactttcgtttcttgatctactttcgtttcttacgctactttcgtttcttgccgctactttcgtttcttgctttactttcgtttcttgatctactttcgtttcttacgctactttcgtttct

SEQ ID NO: 6417 - DNA, 139 bp, synthetic construct
  source 1..139: mol_type = other DNA
agaaacgaaagttgctttagaaacgaaagttgatctagaaacgaaagttacgctagaaacgaaagttgccgctagaaacgaaagttgctttagaaacgaaagttgatctagaaacgaaagttacgctagaaacgaaagt

SEQ ID NO: 6418 - DNA, 142 bp, synthetic construct
  source 1..142: mol_type = other DNA
caaactgtcaagcgctgatctcaaactgtcaagcgctacgctcaaactgtcaagcgctgccgctcaaactgtcaagcgctgctttcaaactgtcaagcgctgatctcaaactgtcaagcgctacgctcaaactgtcaagcgc

SEQ ID NO: 6419 - DNA, 142 bp, synthetic construct
  source 1..142: mol_type = other DNA
gcgcttgacagtttgtgatctgcgcttgacagtttgtacgctgcgcttgacagtttgtgccgctgcgcttgacagtttgtgctttgcgcttgacagtttgtgatctgcgcttgacagtttgtacgctgcgcttgacagtttg

SEQ ID NO: 6420 - DNA, 142 bp, synthetic construct
  source 1..142: mol_type = other DNA
caaactgtcaagtgctgatctcaaactgtcaagtgctacgctcaaactgtcaagtgctgccgctcaaactgtcaagtgctgctttcaaactgtcaagtgctgatctcaaactgtcaagtgctacgctcaaactgtcaagtgc

SEQ ID NO: 6421 - DNA, 142 bp, synthetic construct
  source 1..142: mol_type = other DNA
gcacttgacagtttgtgatctgcacttgacagtttgtacgctgcacttgacagtttgtgccgctgcacttgacagtttgtgctttgcacttgacagtttgtgatctgcacttgacagtttgtacgctgcacttgacagtttg

SEQ ID NO: 6422 - DNA, 142 bp, synthetic construct
  source 1..142: mol_type = other DNA
caaactgtcgagcgctgatctcaaactgtcgagcgctacgctcaaactgtcgagcgctgccgctcaaactgtcgagcgctgctttcaaactgtcgagcgctgatctcaaactgtcgagcgctacgctcaaactgtcgagcgc

SEQ ID NO: 6423 - DNA, 142 bp, synthetic construct
  source 1..142: mol_type = other DNA
gcgctcgacagtttgtgatctgcgctcgacagtttgtacgctgcgctcgacagtttgtgccgctgcgctcgacagtttgtgctttgcgctcgacagtttgtgatctgcgctcgacagtttgtacgctgcgctcgacagtttg

SEQ ID NO: 6424 - DNA, 142 bp, synthetic construct
  source 1..142: mol_type = other DNA
caaactgtcgagtgctgatctcaaactgtcgagtgctacgctcaaactgtcgagtgctgccgctcaaactgtcgagtgctgctttcaaactgtcgagtgctgatctcaaactgtcgagtgctacgctcaaactgtcgagtgc

SEQ ID NO: 6425 - DNA, 142 bp, synthetic construct
  source 1..142: mol_type = other DNA
gcactcgacagtttgtgatctgcactcgacagtttgtacgctgcactcgacagtttgtgccgctgcactcgacagtttgtgctttgcactcgacagtttgtgatctgcactcgacagtttgtacgctgcactcgacagtttg

SEQ ID NO: 6426 - DNA, 142 bp, synthetic construct
  source 1..142: mol_type = other DNA
taaactgtcaagcgctgatcttaaactgtcaagcgctacgcttaaactgtcaagcgctgccgcttaaactgtcaagcgctgcttttaaactgtcaagcgctgatcttaaactgtcaagcgctacgcttaaactgtcaagcgc

SEQ ID NO: 6427 - DNA, 142 bp, synthetic construct
  source 1..142: mol_type = other DNA
gcgcttgacagtttatgatctgcgcttgacagtttatacgctgcgcttgacagtttatgccgctgcgcttgacagtttatgctttgcgcttgacagtttatgatctgcgcttgacagtttatacgctgcgcttgacagttta

SEQ ID NO: 6428 - DNA, 142 bp, synthetic construct
  source 1..142: mol_type = other DNA
taaactgtcaagtgctgatcttaaactgtcaagtgctacgcttaaactgtcaagtgctgccgcttaaactgtcaagtgctgcttttaaactgtcaagtgctgatcttaaactgtcaagtgctacgcttaaactgtcaagtgc

SEQ ID NO: 6429 - DNA, 142 bp, synthetic construct
  source 1..142: mol_type = other DNA
gcacttgacagtttatgatctgcacttgacagtttatacgctgcacttgacagtttatgccgctgcacttgacagtttatgctttgcacttgacagtttatgatctgcacttgacagtttatacgctgcacttgacagttta

SEQ ID NO: 6430 - DNA, 142 bp, synthetic construct
  source 1..142: mol_type = other DNA
taaactgtcgagcgctgatcttaaactgtcgagcgctacgcttaaactgtcgagcgctgccgcttaaactgtcgagcgctgcttttaaactgtcgagcgctgatcttaaactgtcgagcgctacgcttaaactgtcgagcgc

SEQ ID NO: 6431 - DNA, 142 bp, synthetic construct
  source 1..142: mol_type = other DNA
gcgctcgacagtttatgatctgcgctcgacagtttatacgctgcgctcgacagtttatgccgctgcgctcgacagtttatgctttgcgctcgacagtttatgatctgcgctcgacagtttatacgctgcgctcgacagttta

SEQ ID NO: 6432 - DNA, 142 bp, synthetic construct
  source 1..142: mol_type = other DNA
taaactgtcgagtgctgatcttaaactgtcgagtgctacgcttaaactgtcgagtgctgccgcttaaactgtcgagtgctgcttttaaactgtcgagtgctgatcttaaactgtcgagtgctacgcttaaactgtcgagtgc

SEQ ID NO: 6433 - DNA, 142 bp, synthetic construct
  source 1..142: mol_type = other DNA
gcactcgacagtttatgatctgcactcgacagtttatacgctgcactcgacagtttatgccgctgcactcgacagtttatgctttgcactcgacagtttatgatctgcactcgacagtttatacgctgcactcgacagttta

SEQ ID NO: 6434 - DNA, 147 bp, synthetic construct
  source 1..147: mol_type = other DNA
ggccacgcccacctgctttggccacgcccacctgatctggccacgcccacctacgctggccacgcccacctgccgctggccacgcccacctgctttggccacgcccacctgatctggccacgcccacctacgctggccacgcccacc

SEQ ID NO: 6435 - DNA, 147 bp, synthetic construct
  source 1..147: mol_type = other DNA
ggtgggcgtggcctgctttggtgggcgtggcctgatctggtgggcgtggcctacgctggtgggcgtggcctgccgctggtgggcgtggcctgctttggtgggcgtggcctgatctggtgggcgtggcctacgctggtgggcgtggcc

SEQ ID NO: 6436 - DNA, 147 bp, synthetic construct
  source 1..147: mol_type = other DNA
ggccacgcccacttgctttggccacgcccacttgatctggccacgcccacttacgctggccacgcccacttgccgctggccacgcccacttgctttggccacgcccacttgatctggccacgcccacttacgctggccacgcccact

SEQ ID NO: 6437 - DNA, 147 bp, synthetic construct
  source 1..147: mol_type = other DNA
agtgggcgtggcctgctttagtgggcgtggcctgatctagtgggcgtggcctacgctagtgggcgtggcctgccgctagtgggcgtggcctgctttagtgggcgtggcctgatctagtgggcgtggcctacgctagtgggcgtggcc

SEQ ID NO: 6438 - DNA, 147 bp, synthetic construct
  source 1..147: mol_type = other DNA
ggccacgcccccctgctttggccacgcccccctgatctggccacgcccccctacgctggccacgcccccctgccgctggccacgcccccctgctttggccacgcccccctgatctggccacgcccccctacgctggccacgcccccc

SEQ ID NO: 6439 - DNA, 147 bp, synthetic construct
  source 1..147: mol_type = other DNA
ggggggcgtggcctgctttggggggcgtggcctgatctggggggcgtggcctacgctggggggcgtggcctgccgctggggggcgtggcctgctttggggggcgtggcctgatctggggggcgtggcctacgctggggggcgtggcc

SEQ ID NO: 6440 - DNA, 147 bp, synthetic construct
  source 1..147: mol_type = other DNA
ggccacgcccccttgctttggccacgcccccttgatctggccacgcccccttacgctggccacgcccccttgccgctggccacgcccccttgctttggccacgcccccttgatctggccacgcccccttacgctggccacgccccct

SEQ ID NO: 6441 - DNA, 147 bp, synthetic construct
  source 1..147: mol_type = other DNA
agggggcgtggcctgctttagggggcgtggcctgatctagggggcgtggcctacgctagggggcgtggcctgccgctagggggcgtggcctgctttagggggcgtggcctgatctagggggcgtggcctacgctagggggcgtggcc

SEQ ID NO: 6442 - DNA, 147 bp, synthetic construct
  source 1..147: mol_type = other DNA
ggccccgcccacctgctttggccccgcccacctgatctggccccgcccacctacgctggccccgcccacctgccgctggccccgcccacctgctttggccccgcccacctgatctggccccgcccacctacgctggccccgcccacc

SEQ ID NO: 6443 - DNA, 147 bp, synthetic construct
  source 1..147: mol_type = other DNA
ggtgggcggggcctgctttggtgggcggggcctgatctggtgggcggggcctacgctggtgggcggggcctgccgctggtgggcggggcctgctttggtgggcggggcctgatctggtgggcggggcctacgctggtgggcggggcc

SEQ ID NO: 6444 - DNA, 147 bp, synthetic construct
  source 1..147: mol_type = other DNA
ggccccgcccacttgctttggccccgcccacttgatctggccccgcccacttacgctggccccgcccacttgccgctggccccgcccacttgctttggccccgcccacttgatctggccccgcccacttacgctggccccgcccact

SEQ ID NO: 6445 - DNA, 147 bp, synthetic construct
  source 1..147: mol_type = other DNA
agtgggcggggcctgctttagtgggcggggcctgatctagtgggcggggcctacgctagtgggcggggcctgccgctagtgggcggggcctgctttagtgggcggggcctgatctagtgggcggggcctacgctagtgggcggggcc

SEQ ID NO: 6446 - DNA, 147 bp, synthetic construct
  source 1..147: mol_type = other DNA
ggccccgcccccctgctttggccccgcccccctgatctggccccgcccccctacgctggccccgcccccctgccgctggccccgcccccctgctttggccccgcccccctgatctggccccgcccccctacgctggccccgcccccc

SEQ ID NO: 6447 - DNA, 147 bp, synthetic construct
  source 1..147: mol_type = other DNA
ggggggcggggcctgctttggggggcggggcctgatctggggggcggggcctacgctggggggcggggcctgccgctggggggcggggcctgctttggggggcggggcctgatctggggggcggggcctacgctggggggcggggcc

SEQ ID NO: 6448 - DNA, 147 bp, synthetic construct
  source 1..147: mol_type = other DNA
ggccccgcccccttgctttggccccgcccccttgatctggccccgcccccttacgctggccccgcccccttgccgctggccccgcccccttgctttggccccgcccccttgatctggccccgcccccttacgctggccccgccccct

SEQ ID NO: 6449 - DNA, 147 bp, synthetic construct
  source 1..147: mol_type = other DNA
agggggcggggcctgctttagggggcggggcctgatctagggggcggggcctacgctagggggcggggcctgccgctagggggcggggcctgctttagggggcggggcctgatctagggggcggggcctacgctagggggcggggcc

SEQ ID NO: 6450 - DNA, 140 bp, synthetic construct
  source 1..140: mol_type = other DNA
agataatgctttagataatgatctagataatacgctagataatgccgctagataatgctttagataatgatctagataatacgctagataatgccgctagataatgctttagataatgatctagataatacgctagataa

SEQ ID NO: 6451 - DNA, 140 bp, synthetic construct
  source 1..140: mol_type = other DNA
ttatcttgctttttatcttgatctttatcttacgctttatcttgccgctttatcttgctttttatcttgatctttatcttacgctttatcttgccgctttatcttgctttttatcttgatctttatcttacgctttatct

SEQ ID NO: 6452 - DNA, 140 bp, synthetic construct
  source 1..140: mol_type = other DNA
tgataatgcttttgataatgatcttgataatacgcttgataatgccgcttgataatgcttttgataatgatcttgataatacgcttgataatgccgcttgataatgcttttgataatgatcttgataatacgcttgataa

SEQ ID NO: 6453 - DNA, 140 bp, synthetic construct
  source 1..140: mol_type = other DNA
ttatcatgctttttatcatgatctttatcatacgctttatcatgccgctttatcatgctttttatcatgatctttatcatacgctttatcatgccgctttatcatgctttttatcatgatctttatcatacgctttatca

SEQ ID NO: 6454 - DNA, 135 bp, synthetic construct
  source 1..135: mol_type = other DNA
cagtcaccctcaggtgatctcagtcaccctcaggtacgctcagtcaccctcaggtgccgctcagtcaccctcaggtgctttcagtcaccctcaggtgatctcagtcaccctcaggtacgctcagtcaccctcagg

SEQ ID NO: 6455 - DNA, 135 bp, synthetic construct
  source 1..135: mol_type = other DNA
cctgagggtgactgtgatctcctgagggtgactgtacgctcctgagggtgactgtgccgctcctgagggtgactgtgctttcctgagggtgactgtgatctcctgagggtgactgtacgctcctgagggtgactg

SEQ ID NO: 6456 - DNA, 135 bp, synthetic construct
  source 1..135: mol_type = other DNA
cagtcaccctctggtgatctcagtcaccctctggtacgctcagtcaccctctggtgccgctcagtcaccctctggtgctttcagtcaccctctggtgatctcagtcaccctctggtacgctcagtcaccctctgg

SEQ ID NO: 6457 - DNA, 135 bp, synthetic construct
  source 1..135: mol_type = other DNA
ccagagggtgactgtgatctccagagggtgactgtacgctccagagggtgactgtgccgctccagagggtgactgtgctttccagagggtgactgtgatctccagagggtgactgtacgctccagagggtgactg

SEQ ID NO: 6458 - DNA, 135 bp, synthetic construct
  source 1..135: mol_type = other DNA
cagtcaccttcaggtgatctcagtcaccttcaggtacgctcagtcaccttcaggtgccgctcagtcaccttcaggtgctttcagtcaccttcaggtgatctcagtcaccttcaggtacgctcagtcaccttcagg

SEQ ID NO: 6459 - DNA, 135 bp, synthetic construct
  source 1..135: mol_type = other DNA
cctgaaggtgactgtgatctcctgaaggtgactgtacgctcctgaaggtgactgtgccgctcctgaaggtgactgtgctttcctgaaggtgactgtgatctcctgaaggtgactgtacgctcctgaaggtgactg

SEQ ID NO: 6460 - DNA, 135 bp, synthetic construct
  source 1..135: mol_type = other DNA
cagtcaccttctggtgatctcagtcaccttctggtacgctcagtcaccttctggtgccgctcagtcaccttctggtgctttcagtcaccttctggtgatctcagtcaccttctggtacgctcagtcaccttctgg

SEQ ID NO: 6461 - DNA, 135 bp, synthetic construct
  source 1..135: mol_type = other DNA
ccagaaggtgactgtgatctccagaaggtgactgtacgctccagaaggtgactgtgccgctccagaaggtgactgtgctttccagaaggtgactgtgatctccagaaggtgactgtacgctccagaaggtgactg

SEQ ID NO: 6462 - DNA, 139 bp, synthetic construct
  source 1..139: mol_type = other DNA
atgacgtcaccatgctttatgacgtcaccatgatctatgacgtcaccatacgctatgacgtcaccatgccgctatgacgtcaccatgctttatgacgtcaccatgatctatgacgtcaccatacgctatgacgtcacca

SEQ ID NO: 6463 - DNA, 139 bp, synthetic construct
  source 1..139: mol_type = other DNA
tggtgacgtcattgcttttggtgacgtcattgatcttggtgacgtcattacgcttggtgacgtcattgccgcttggtgacgtcattgcttttggtgacgtcattgatcttggtgacgtcattacgcttggtgacgtcat

SEQ ID NO: 6464 - DNA, 139 bp, synthetic construct
  source 1..139: mol_type = other DNA
atgacgtcaccctgctttatgacgtcaccctgatctatgacgtcaccctacgctatgacgtcaccctgccgctatgacgtcaccctgctttatgacgtcaccctgatctatgacgtcaccctacgctatgacgtcaccc

SEQ ID NO: 6465 - DNA, 139 bp, synthetic construct
  source 1..139: mol_type = other DNA
gggtgacgtcattgctttgggtgacgtcattgatctgggtgacgtcattacgctgggtgacgtcattgccgctgggtgacgtcattgctttgggtgacgtcattgatctgggtgacgtcattacgctgggtgacgtcat

SEQ ID NO: 6466 - DNA, 139 bp, synthetic construct
  source 1..139: mol_type = other DNA
atgacgtcatcatgctttatgacgtcatcatgatctatgacgtcatcatacgctatgacgtcatcatgccgctatgacgtcatcatgctttatgacgtcatcatgatctatgacgtcatcatacgctatgacgtcatca

SEQ ID NO: 6467 - DNA, 139 bp, synthetic construct
  source 1..139: mol_type = other DNA
tgatgacgtcattgcttttgatgacgtcattgatcttgatgacgtcattacgcttgatgacgtcattgccgcttgatgacgtcattgcttttgatgacgtcattgatcttgatgacgtcattacgcttgatgacgtcat

SEQ ID NO: 6468 - DNA, 139 bp, synthetic construct
  source 1..139: mol_type = other DNA
atgacgtcatcctgctttatgacgtcatcctgatctatgacgtcatcctacgctatgacgtcatcctgccgctatgacgtcatcctgctttatgacgtcatcctgatctatgacgtcatcctacgctatgacgtcatcc

SEQ ID NO: 6469 - DNA, 139 bp, synthetic construct
  source 1..139: mol_type = other DNA
ggatgacgtcattgctttggatgacgtcattgatctggatgacgtcattacgctggatgacgtcattgccgctggatgacgtcattgctttggatgacgtcattgatctggatgacgtcattacgctggatgacgtcat

SEQ ID NO: 6470 - DNA, 139 bp, synthetic construct
  source 1..139: mol_type = other DNA
gtgacgtcaccatgctttgtgacgtcaccatgatctgtgacgtcaccatacgctgtgacgtcaccatgccgctgtgacgtcaccatgctttgtgacgtcaccatgatctgtgacgtcaccatacgctgtgacgtcacca

SEQ ID NO: 6471 - DNA, 139 bp, synthetic construct
  source 1..139: mol_type = other DNA
tggtgacgtcactgcttttggtgacgtcactgatcttggtgacgtcactacgcttggtgacgtcactgccgcttggtgacgtcactgcttttggtgacgtcactgatcttggtgacgtcactacgcttggtgacgtcac

SEQ ID NO: 6472 - DNA, 139 bp, synthetic construct
  source 1..139: mol_type = other DNA
gtgacgtcaccctgctttgtgacgtcaccctgatctgtgacgtcaccctacgctgtgacgtcaccctgccgctgtgacgtcaccctgctttgtgacgtcaccctgatctgtgacgtcaccctacgctgtgacgtcaccc

SEQ ID NO: 6473 - DNA, 139 bp, synthetic construct
  source 1..139: mol_type = other DNA
gggtgacgtcactgctttgggtgacgtcactgatctgggtgacgtcactacgctgggtgacgtcactgccgctgggtgacgtcactgctttgggtgacgtcactgatctgggtgacgtcactacgctgggtgacgtcac

SEQ ID NO: 6474 - DNA, 139 bp, synthetic construct
  source 1..139: mol_type = other DNA
gtgacgtcatcatgctttgtgacgtcatcatgatctgtgacgtcatcatacgctgtgacgtcatcatgccgctgtgacgtcatcatgctttgtgacgtcatcatgatctgtgacgtcatcatacgctgtgacgtcatca

SEQ ID NO: 6475 - DNA, 139 bp, synthetic construct
  source 1..139: mol_type = other DNA
tgatgacgtcactgcttttgatgacgtcactgatcttgatgacgtcactacgcttgatgacgtcactgccgcttgatgacgtcactgcttttgatgacgtcactgatcttgatgacgtcactacgcttgatgacgtcac

SEQ ID NO: 6476 - DNA, 139 bp, synthetic construct
  source 1..139: mol_type = other DNA
gtgacgtcatcctgctttgtgacgtcatcctgatctgtgacgtcatcctacgctgtgacgtcatcctgccgctgtgacgtcatcctgctttgtgacgtcatcctgatctgtgacgtcatcctacgctgtgacgtcatcc

SEQ ID NO: 6477 - DNA, 139 bp, synthetic construct
  source 1..139: mol_type = other DNA
ggatgacgtcactgctttggatgacgtcactgatctggatgacgtcactacgctggatgacgtcactgccgctggatgacgtcactgctttggatgacgtcactgatctggatgacgtcactacgctggatgacgtcac

SEQ ID NO: 6478 - DNA, 149 bp, synthetic construct
  source 1..149: mol_type = other DNA
accaaaggtcatgccgctaccaaaggtcatgctttaccaaaggtcatgatctaccaaaggtcatacgctaccaaaggtcatgccgctaccaaaggtcatgctttaccaaaggtcatgatctaccaaaggtcatacgctaccaaaggtca

SEQ ID NO: 6479 - DNA, 149 bp, synthetic construct
  source 1..149: mol_type = other DNA
tgacctttggttgccgcttgacctttggttgcttttgacctttggttgatcttgacctttggttacgcttgacctttggttgccgcttgacctttggttgcttttgacctttggttgatcttgacctttggttacgcttgacctttggt

SEQ ID NO: 6480 - DNA, 149 bp, synthetic construct
  source 1..149: mol_type = other DNA
accaagggtcatgccgctaccaagggtcatgctttaccaagggtcatgatctaccaagggtcatacgctaccaagggtcatgccgctaccaagggtcatgctttaccaagggtcatgatctaccaagggtcatacgctaccaagggtca

SEQ ID NO: 6481 - DNA, 149 bp, synthetic construct
  source 1..149: mol_type = other DNA
tgacccttggttgccgcttgacccttggttgcttttgacccttggttgatcttgacccttggttacgcttgacccttggttgccgcttgacccttggttgcttttgacccttggttgatcttgacccttggttacgcttgacccttggt

SEQ ID NO: 6482 - DNA, 149 bp, synthetic construct
  source 1..149: mol_type = other DNA
accagaggtcatgccgctaccagaggtcatgctttaccagaggtcatgatctaccagaggtcatacgctaccagaggtcatgccgctaccagaggtcatgctttaccagaggtcatgatctaccagaggtcatacgctaccagaggtca

SEQ ID NO: 6483 - DNA, 149 bp, synthetic construct
  source 1..149: mol_type = other DNA
tgacctctggttgccgcttgacctctggttgcttttgacctctggttgatcttgacctctggttacgcttgacctctggttgccgcttgacctctggttgcttttgacctctggttgatcttgacctctggttacgcttgacctctggt

SEQ ID NO: 6484 - DNA, 149 bp, synthetic construct
  source 1..149: mol_type = other DNA
accaggggtcatgccgctaccaggggtcatgctttaccaggggtcatgatctaccaggggtcatacgctaccaggggtcatgccgctaccaggggtcatgctttaccaggggtcatgatctaccaggggtcatacgctaccaggggtca

SEQ ID NO: 6485 - DNA, 149 bp, synthetic construct
  source 1..149: mol_type = other DNA
tgacccctggttgccgcttgacccctggttgcttttgacccctggttgatcttgacccctggttacgcttgacccctggttgccgcttgacccctggttgcttttgacccctggttgatcttgacccctggttacgcttgacccctggt

SEQ ID NO: 6486 - DNA, 149 bp, synthetic construct
  source 1..149: mol_type = other DNA
agcaaaggtcatgccgctagcaaaggtcatgctttagcaaaggtcatgatctagcaaaggtcatacgctagcaaaggtcatgccgctagcaaaggtcatgctttagcaaaggtcatgatctagcaaaggtcatacgctagcaaaggtca

SEQ ID NO: 6487 - DNA, 149 bp, synthetic construct
  source 1..149: mol_type = other DNA
tgacctttgcttgccgcttgacctttgcttgcttttgacctttgcttgatcttgacctttgcttacgcttgacctttgcttgccgcttgacctttgcttgcttttgacctttgcttgatcttgacctttgcttacgcttgacctttgct

SEQ ID NO: 6488 - DNA, 149 bp, synthetic construct
  source 1..149: mol_type = other DNA
agcaagggtcatgccgctagcaagggtcatgctttagcaagggtcatgatctagcaagggtcatacgctagcaagggtcatgccgctagcaagggtcatgctttagcaagggtcatgatctagcaagggtcatacgctagcaagggtca

SEQ ID NO: 6489 - DNA, 149 bp, synthetic construct
  source 1..149: mol_type = other DNA
tgacccttgcttgccgcttgacccttgcttgcttttgacccttgcttgatcttgacccttgcttacgcttgacccttgcttgccgcttgacccttgcttgcttttgacccttgcttgatcttgacccttgcttacgcttgacccttgct

SEQ ID NO: 6490 - DNA, 149 bp, synthetic construct
  source 1..149: mol_type = other DNA
agcagaggtcatgccgctagcagaggtcatgctttagcagaggtcatgatctagcagaggtcatacgctagcagaggtcatgccgctagcagaggtcatgctttagcagaggtcatgatctagcagaggtcatacgctagcagaggtca

SEQ ID NO: 6491 - DNA, 149 bp, synthetic construct
  source 1..149: mol_type = other DNA
tgacctctgcttgccgcttgacctctgcttgcttttgacctctgcttgatcttgacctctgcttacgcttgacctctgcttgccgcttgacctctgcttgcttttgacctctgcttgatcttgacctctgcttacgcttgacctctgct

SEQ ID NO: 6492 - DNA, 149 bp, synthetic construct
  source 1..149: mol_type = other DNA
agcaggggtcatgccgctagcaggggtcatgctttagcaggggtcatgatctagcaggggtcatacgctagcaggggtcatgccgctagcaggggtcatgctttagcaggggtcatgatctagcaggggtcatacgctagcaggggtca

SEQ ID NO: 6493 - DNA, 149 bp, synthetic construct
  source 1..149: mol_type = other DNA
tgacccctgcttgccgcttgacccctgcttgcttttgacccctgcttgatcttgacccctgcttacgcttgacccctgcttgccgcttgacccctgcttgcttttgacccctgcttgatcttgacccctgcttacgcttgacccctgct

SEQ ID NO: 6494 - DNA, 149 bp, synthetic construct
  source 1..149: mol_type = other DNA
atcaaaggtcatgccgctatcaaaggtcatgctttatcaaaggtcatgatctatcaaaggtcatacgctatcaaaggtcatgccgctatcaaaggtcatgctttatcaaaggtcatgatctatcaaaggtcatacgctatcaaaggtca

SEQ ID NO: 6495 - DNA, 149 bp, synthetic construct
  source 1..149: mol_type = other DNA
tgacctttgattgccgcttgacctttgattgcttttgacctttgattgatcttgacctttgattacgcttgacctttgattgccgcttgacctttgattgcttttgacctttgattgatcttgacctttgattacgcttgacctttgat

SEQ ID NO: 6496 - DNA, 149 bp, synthetic construct
  source 1..149: mol_type = other DNA
atcaagggtcatgccgctatcaagggtcatgctttatcaagggtcatgatctatcaagggtcatacgctatcaagggtcatgccgctatcaagggtcatgctttatcaagggtcatgatctatcaagggtcatacgctatcaagggtca

SEQ ID NO: 6497 - DNA, 149 bp, synthetic construct
  source 1..149: mol_type = other DNA
tgacccttgattgccgcttgacccttgattgcttttgacccttgattgatcttgacccttgattacgcttgacccttgattgccgcttgacccttgattgcttttgacccttgattgatcttgacccttgattacgcttgacccttgat

SEQ ID NO: 6498 - DNA, 149 bp, synthetic construct
  source 1..149: mol_type = other DNA
atcagaggtcatgccgctatcagaggtcatgctttatcagaggtcatgatctatcagaggtcatacgctatcagaggtcatgccgctatcagaggtcatgctttatcagaggtcatgatctatcagaggtcatacgctatcagaggtca

SEQ ID NO: 6499 - DNA, 149 bp, synthetic construct
  source 1..149: mol_type = other DNA
tgacctctgattgccgcttgacctctgattgcttttgacctctgattgatcttgacctctgattacgcttgacctctgattgccgcttgacctctgattgcttttgacctctgattgatcttgacctctgattacgcttgacctctgat

SEQ ID NO: 6500 - DNA, 149 bp, synthetic construct
  source 1..149: mol_type = other DNA
atcaggggtcatgccgctatcaggggtcatgctttatcaggggtcatgatctatcaggggtcatacgctatcaggggtcatgccgctatcaggggtcatgctttatcaggggtcatgatctatcaggggtcatacgctatcaggggtca

SEQ ID NO: 6501 - DNA, 149 bp, synthetic construct
  source 1..149: mol_type = other DNA
tgacccctgattgccgcttgacccctgattgcttttgacccctgattgatcttgacccctgattacgcttgacccctgattgccgcttgacccctgattgcttttgacccctgattgatcttgacccctgattacgcttgacccctgat

SEQ ID NO: 6502 - DNA, 149 bp, synthetic construct
  source 1..149: mol_type = other DNA
gccaaaggtcatgccgctgccaaaggtcatgctttgccaaaggtcatgatctgccaaaggtcatacgctgccaaaggtcatgccgctgccaaaggtcatgctttgccaaaggtcatgatctgccaaaggtcatacgctgccaaaggtca

SEQ ID NO: 6503 - DNA, 149 bp, synthetic construct
  source 1..149: mol_type = other DNA
tgacctttggctgccgcttgacctttggctgcttttgacctttggctgatcttgacctttggctacgcttgacctttggctgccgcttgacctttggctgcttttgacctttggctgatcttgacctttggctacgcttgacctttggc

SEQ ID NO: 6504 - DNA, 149 bp, synthetic construct
  source 1..149: mol_type = other DNA
gccaagggtcatgccgctgccaagggtcatgctttgccaagggtcatgatctgccaagggtcatacgctgccaagggtcatgccgctgccaagggtcatgctttgccaagggtcatgatctgccaagggtcatacgctgccaagggtca

SEQ ID NO: 6505 - DNA, 149 bp, synthetic construct
  source 1..149: mol_type = other DNA
tgacccttggctgccgcttgacccttggctgcttttgacccttggctgatcttgacccttggctacgcttgacccttggctgccgcttgacccttggctgcttttgacccttggctgatcttgacccttggctacgcttgacccttggc

SEQ ID NO: 6506 - DNA, 149 bp, synthetic construct
  source 1..149: mol_type = other DNA
gccagaggtcatgccgctgccagaggtcatgctttgccagaggtcatgatctgccagaggtcatacgctgccagaggtcatgccgctgccagaggtcatgctttgccagaggtcatgatctgccagaggtcatacgctgccagaggtca

SEQ ID NO: 6507 - DNA, 149 bp, synthetic construct
  source 1..149: mol_type = other DNA
tgacctctggctgccgcttgacctctggctgcttttgacctctggctgatcttgacctctggctacgcttgacctctggctgccgcttgacctctggctgcttttgacctctggctgatcttgacctctggctacgcttgacctctggc

SEQ ID NO: 6508 - DNA, 149 bp, synthetic construct
  source 1..149: mol_type = other DNA
gccaggggtcatgccgctgccaggggtcatgctttgccaggggtcatgatctgccaggggtcatacgctgccaggggtcatgccgctgccaggggtcatgctttgccaggggtcatgatctgccaggggtcatacgctgccaggggtca

SEQ ID NO: 6509 - DNA, 149 bp, synthetic construct
  source 1..149: mol_type = other DNA
tgacccctggctgccgcttgacccctggctgcttttgacccctggctgatcttgacccctggctacgcttgacccctggctgccgcttgacccctggctgcttttgacccctggctgatcttgacccctggctacgcttgacccctggc

SEQ ID NO: 6510 - DNA, 149 bp, synthetic construct
  source 1..149: mol_type = other DNA
ggcaaaggtcatgccgctggcaaaggtcatgctttggcaaaggtcatgatctggcaaaggtcatacgctggcaaaggtcatgccgctggcaaaggtcatgctttggcaaaggtcatgatctggcaaaggtcatacgctggcaaaggtca

SEQ ID NO: 6511 - DNA, 149 bp, synthetic construct
  source 1..149: mol_type = other DNA
tgacctttgcctgccgcttgacctttgcctgcttttgacctttgcctgatcttgacctttgcctacgcttgacctttgcctgccgcttgacctttgcctgcttttgacctttgcctgatcttgacctttgcctacgcttgacctttgcc

SEQ ID NO: 6512 - DNA, 149 bp, synthetic construct
  source 1..149: mol_type = other DNA
ggcaagggtcatgccgctggcaagggtcatgctttggcaagggtcatgatctggcaagggtcatacgctggcaagggtcatgccgctggcaagggtcatgctttggcaagggtcatgatctggcaagggtcatacgctggcaagggtca

SEQ ID NO: 6513 - DNA, 149 bp, synthetic construct
  source 1..149: mol_type = other DNA
tgacccttgcctgccgcttgacccttgcctgcttttgacccttgcctgatcttgacccttgcctacgcttgacccttgcctgccgcttgacccttgcctgcttttgacccttgcctgatcttgacccttgcctacgcttgacccttgcc

SEQ ID NO: 6514 - DNA, 149 bp, synthetic construct
  source 1..149: mol_type = other DNA
ggcagaggtcatgccgctggcagaggtcatgctttggcagaggtcatgatctggcagaggtcatacgctggcagaggtcatgccgctggcagaggtcatgctttggcagaggtcatgatctggcagaggtcatacgctggcagaggtca

SEQ ID NO: 6515 - DNA, 149 bp, synthetic construct
  source 1..149: mol_type = other DNA
tgacctctgcctgccgcttgacctctgcctgcttttgacctctgcctgatcttgacctctgcctacgcttgacctctgcctgccgcttgacctctgcctgcttttgacctctgcctgatcttgacctctgcctacgcttgacctctgcc

SEQ ID NO: 6516 - DNA, 149 bp, synthetic construct
  source 1..149: mol_type = other DNA
ggcaggggtcatgccgctggcaggggtcatgctttggcaggggtcatgatctggcaggggtcatacgctggcaggggtcatgccgctggcaggggtcatgctttggcaggggtcatgatctggcaggggtcatacgctggcaggggtca

SEQ ID NO: 6517 - DNA, 149 bp, synthetic construct
  source 1..149: mol_type = other DNA
tgacccctgcctgccgcttgacccctgcctgcttttgacccctgcctgatcttgacccctgcctacgcttgacccctgcctgccgcttgacccctgcctgcttttgacccctgcctgatcttgacccctgcctacgcttgacccctgcc

SEQ ID NO: 6518 - DNA, 149 bp, synthetic construct
  source 1..149: mol_type = other DNA
gtcaaaggtcatgccgctgtcaaaggtcatgctttgtcaaaggtcatgatctgtcaaaggtcatacgctgtcaaaggtcatgccgctgtcaaaggtcatgctttgtcaaaggtcatgatctgtcaaaggtcatacgctgtcaaaggtca

SEQ ID NO: 6519 - DNA, 149 bp, synthetic construct
  source 1..149: mol_type = other DNA
tgacctttgactgccgcttgacctttgactgcttttgacctttgactgatcttgacctttgactacgcttgacctttgactgccgcttgacctttgactgcttttgacctttgactgatcttgacctttgactacgcttgacctttgac

SEQ ID NO: 6520 - DNA, 149 bp, synthetic construct
  source 1..149: mol_type = other DNA
gtcaagggtcatgccgctgtcaagggtcatgctttgtcaagggtcatgatctgtcaagggtcatacgctgtcaagggtcatgccgctgtcaagggtcatgctttgtcaagggtcatgatctgtcaagggtcatacgctgtcaagggtca

SEQ ID NO: 6521 - DNA, 149 bp, synthetic construct
  source 1..149: mol_type = other DNA
tgacccttgactgccgcttgacccttgactgcttttgacccttgactgatcttgacccttgactacgcttgacccttgactgccgcttgacccttgactgcttttgacccttgactgatcttgacccttgactacgcttgacccttgac

SEQ ID NO: 6522 - DNA, 149 bp, synthetic construct
  source 1..149: mol_type = other DNA
gtcagaggtcatgccgctgtcagaggtcatgctttgtcagaggtcatgatctgtcagaggtcatacgctgtcagaggtcatgccgctgtcagaggtcatgctttgtcagaggtcatgatctgtcagaggtcatacgctgtcagaggtca

SEQ ID NO: 6523 - DNA, 149 bp, synthetic construct
  source 1..149: mol_type = other DNA
tgacctctgactgccgcttgacctctgactgcttttgacctctgactgatcttgacctctgactacgcttgacctctgactgccgcttgacctctgactgcttttgacctctgactgatcttgacctctgactacgcttgacctctgac

SEQ ID NO: 6524 - DNA, 149 bp, synthetic construct
  source 1..149: mol_type = other DNA
gtcaggggtcatgccgctgtcaggggtcatgctttgtcaggggtcatgatctgtcaggggtcatacgctgtcaggggtcatgccgctgtcaggggtcatgctttgtcaggggtcatgatctgtcaggggtcatacgctgtcaggggtca

SEQ ID NO: 6525 - DNA, 149 bp, synthetic construct
  source 1..149: mol_type = other DNA
tgacccctgactgccgcttgacccctgactgcttttgacccctgactgatcttgacccctgactacgcttgacccctgactgccgcttgacccctgactgcttttgacccctgactgatcttgacccctgactacgcttgacccctgac

SEQ ID NO: 6526 - DNA, 136 bp, synthetic construct
  source 1..136: mol_type = other DNA
gtaaacagtacgctgtaaacagtgccgctgtaaacagtgctttgtaaacagtgatctgtaaacagtacgctgtaaacagtgccgctgtaaacagtgctttgtaaacagtgatctgtaaacagtacgctgtaaacag

SEQ ID NO: 6527 - DNA, 136 bp, synthetic construct
  source 1..136: mol_type = other DNA
ctgtttactacgctctgtttactgccgctctgtttactgctttctgtttactgatctctgtttactacgctctgtttactgccgctctgtttactgctttctgtttactgatctctgtttactacgctctgtttac

SEQ ID NO: 6528 - DNA, 149 bp, synthetic construct
  source 1..149: mol_type = other DNA
cgtttaccggaaatgatgatctcgtttaccggaaatgatacgctcgtttaccggaaatgatgccgctcgtttaccggaaatgatgctttcgtttaccggaaatgatgatctcgtttaccggaaatgatacgctcgtttaccggaaatga

SEQ ID NO: 6529 - DNA, 149 bp, synthetic construct
  source 1..149: mol_type = other DNA
tcatttccggtaaacgtgatcttcatttccggtaaacgtacgcttcatttccggtaaacgtgccgcttcatttccggtaaacgtgcttttcatttccggtaaacgtgatcttcatttccggtaaacgtacgcttcatttccggtaaacg

SEQ ID NO: 6530 - DNA, 149 bp, synthetic construct
  source 1..149: mol_type = other DNA
cgtttaccggaaatcatgatctcgtttaccggaaatcatacgctcgtttaccggaaatcatgccgctcgtttaccggaaatcatgctttcgtttaccggaaatcatgatctcgtttaccggaaatcatacgctcgtttaccggaaatca

SEQ ID NO: 6531 - DNA, 149 bp, synthetic construct
  source 1..149: mol_type = other DNA
tgatttccggtaaacgtgatcttgatttccggtaaacgtacgcttgatttccggtaaacgtgccgcttgatttccggtaaacgtgcttttgatttccggtaaacgtgatcttgatttccggtaaacgtacgcttgatttccggtaaacg

SEQ ID NO: 6532 - DNA, 149 bp, synthetic construct
  source 1..149: mol_type = other DNA
cgtttaccggaagtgatgatctcgtttaccggaagtgatacgctcgtttaccggaagtgatgccgctcgtttaccggaagtgatgctttcgtttaccggaagtgatgatctcgtttaccggaagtgatacgctcgtttaccggaagtga

SEQ ID NO: 6533 - DNA, 149 bp, synthetic construct
  source 1..149: mol_type = other DNA
tcacttccggtaaacgtgatcttcacttccggtaaacgtacgcttcacttccggtaaacgtgccgcttcacttccggtaaacgtgcttttcacttccggtaaacgtgatcttcacttccggtaaacgtacgcttcacttccggtaaacg

SEQ ID NO: 6534 - DNA, 149 bp, synthetic construct
  source 1..149: mol_type = other DNA
cgtttaccggaagtcatgatctcgtttaccggaagtcatacgctcgtttaccggaagtcatgccgctcgtttaccggaagtcatgctttcgtttaccggaagtcatgatctcgtttaccggaagtcatacgctcgtttaccggaagtca

SEQ ID NO: 6535 - DNA, 149 bp, synthetic construct
  source 1..149: mol_type = other DNA
tgacttccggtaaacgtgatcttgacttccggtaaacgtacgcttgacttccggtaaacgtgccgcttgacttccggtaaacgtgcttttgacttccggtaaacgtgatcttgacttccggtaaacgtacgcttgacttccggtaaacg

SEQ ID NO: 6536 - DNA, 149 bp, synthetic construct
  source 1..149: mol_type = other DNA
cgtttactggaaatgatgatctcgtttactggaaatgatacgctcgtttactggaaatgatgccgctcgtttactggaaatgatgctttcgtttactggaaatgatgatctcgtttactggaaatgatacgctcgtttactggaaatga

SEQ ID NO: 6537 - DNA, 149 bp, synthetic construct
  source 1..149: mol_type = other DNA
tcatttccagtaaacgtgatcttcatttccagtaaacgtacgcttcatttccagtaaacgtgccgcttcatttccagtaaacgtgcttttcatttccagtaaacgtgatcttcatttccagtaaacgtacgcttcatttccagtaaacg

SEQ ID NO: 6538 - DNA, 149 bp, synthetic construct
  source 1..149: mol_type = other DNA
cgtttactggaaatcatgatctcgtttactggaaatcatacgctcgtttactggaaatcatgccgctcgtttactggaaatcatgctttcgtttactggaaatcatgatctcgtttactggaaatcatacgctcgtttactggaaatca

SEQ ID NO: 6539 - DNA, 149 bp, synthetic construct
  source 1..149: mol_type = other DNA
tgatttccagtaaacgtgatcttgatttccagtaaacgtacgcttgatttccagtaaacgtgccgcttgatttccagtaaacgtgcttttgatttccagtaaacgtgatcttgatttccagtaaacgtacgcttgatttccagtaaacg

SEQ ID NO: 6540 - DNA, 149 bp, synthetic construct
  source 1..149: mol_type = other DNA
cgtttactggaagtgatgatctcgtttactggaagtgatacgctcgtttactggaagtgatgccgctcgtttactggaagtgatgctttcgtttactggaagtgatgatctcgtttactggaagtgatacgctcgtttactggaagtga

SEQ ID NO: 6541 - DNA, 149 bp, synthetic construct
  source 1..149: mol_type = other DNA
tcacttccagtaaacgtgatcttcacttccagtaaacgtacgcttcacttccagtaaacgtgccgcttcacttccagtaaacgtgcttttcacttccagtaaacgtgatcttcacttccagtaaacgtacgcttcacttccagtaaacg

SEQ ID NO: 6542 - DNA, 149 bp, synthetic construct
  source 1..149: mol_type = other DNA
cgtttactggaagtcatgatctcgtttactggaagtcatacgctcgtttactggaagtcatgccgctcgtttactggaagtcatgctttcgtttactggaagtcatgatctcgtttactggaagtcatacgctcgtttactggaagtca

SEQ ID NO: 6543 - DNA, 149 bp, synthetic construct
  source 1..149: mol_type = other DNA
tgacttccagtaaacgtgatcttgacttccagtaaacgtacgcttgacttccagtaaacgtgccgcttgacttccagtaaacgtgcttttgacttccagtaaacgtgatcttgacttccagtaaacgtacgcttgacttccagtaaacg

SEQ ID NO: 6544 - DNA, 149 bp, synthetic construct
  source 1..149: mol_type = other DNA
cgtttcccggaaatgatgatctcgtttcccggaaatgatacgctcgtttcccggaaatgatgccgctcgtttcccggaaatgatgctttcgtttcccggaaatgatgatctcgtttcccggaaatgatacgctcgtttcccggaaatga

SEQ ID NO: 6545 - DNA, 149 bp, synthetic construct
  source 1..149: mol_type = other DNA
tcatttccgggaaacgtgatcttcatttccgggaaacgtacgcttcatttccgggaaacgtgccgcttcatttccgggaaacgtgcttttcatttccgggaaacgtgatcttcatttccgggaaacgtacgcttcatttccgggaaacg

SEQ ID NO: 6546 - DNA, 149 bp, synthetic construct
  source 1..149: mol_type = other DNA
cgtttcccggaaatcatgatctcgtttcccggaaatcatacgctcgtttcccggaaatcatgccgctcgtttcccggaaatcatgctttcgtttcccggaaatcatgatctcgtttcccggaaatcatacgctcgtttcccggaaatca

SEQ ID NO: 6547 - DNA, 149 bp, synthetic construct
  source 1..149: mol_type = other DNA
tgatttccgggaaacgtgatcttgatttccgggaaacgtacgcttgatttccgggaaacgtgccgcttgatttccgggaaacgtgcttttgatttccgggaaacgtgatcttgatttccgggaaacgtacgcttgatttccgggaaacg

SEQ ID NO: 6548 - DNA, 149 bp, synthetic construct
  source 1..149: mol_type = other DNA
cgtttcccggaagtgatgatctcgtttcccggaagtgatacgctcgtttcccggaagtgatgccgctcgtttcccggaagtgatgctttcgtttcccggaagtgatgatctcgtttcccggaagtgatacgctcgtttcccggaagtga

SEQ ID NO: 6549 - DNA, 149 bp, synthetic construct
  source 1..149: mol_type = other DNA
tcacttccgggaaacgtgatcttcacttccgggaaacgtacgcttcacttccgggaaacgtgccgcttcacttccgggaaacgtgcttttcacttccgggaaacgtgatcttcacttccgggaaacgtacgcttcacttccgggaaacg

SEQ ID NO: 6550 - DNA, 149 bp, synthetic construct
  source 1..149: mol_type = other DNA
cgtttcccggaagtcatgatctcgtttcccggaagtcatacgctcgtttcccggaagtcatgccgctcgtttcccggaagtcatgctttcgtttcccggaagtcatgatctcgtttcccggaagtcatacgctcgtttcccggaagtca

SEQ ID NO: 6551 - DNA, 149 bp, synthetic construct
  source 1..149: mol_type = other DNA
tgacttccgggaaacgtgatcttgacttccgggaaacgtacgcttgacttccgggaaacgtgccgcttgacttccgggaaacgtgcttttgacttccgggaaacgtgatcttgacttccgggaaacgtacgcttgacttccgggaaacg

SEQ ID NO: 6552 - DNA, 149 bp, synthetic construct
  source 1..149: mol_type = other DNA
cgtttcctggaaatgatgatctcgtttcctggaaatgatacgctcgtttcctggaaatgatgccgctcgtttcctggaaatgatgctttcgtttcctggaaatgatgatctcgtttcctggaaatgatacgctcgtttcctggaaatga

SEQ ID NO: 6553 - DNA, 149 bp, synthetic construct
  source 1..149: mol_type = other DNA
tcatttccaggaaacgtgatcttcatttccaggaaacgtacgcttcatttccaggaaacgtgccgcttcatttccaggaaacgtgcttttcatttccaggaaacgtgatcttcatttccaggaaacgtacgcttcatttccaggaaacg

SEQ ID NO: 6554 - DNA, 149 bp, synthetic construct
  source 1..149: mol_type = other DNA
cgtttcctggaaatcatgatctcgtttcctggaaatcatacgctcgtttcctggaaatcatgccgctcgtttcctggaaatcatgctttcgtttcctggaaatcatgatctcgtttcctggaaatcatacgctcgtttcctggaaatca

SEQ ID NO: 6555 - DNA, 149 bp, synthetic construct
  source 1..149: mol_type = other DNA
tgatttccaggaaacgtgatcttgatttccaggaaacgtacgcttgatttccaggaaacgtgccgcttgatttccaggaaacgtgcttttgatttccaggaaacgtgatcttgatttccaggaaacgtacgcttgatttccaggaaacg

SEQ ID NO: 6556 - DNA, 149 bp, synthetic construct
  source 1..149: mol_type = other DNA
cgtttcctggaagtgatgatctcgtttcctggaagtgatacgctcgtttcctggaagtgatgccgctcgtttcctggaagtgatgctttcgtttcctggaagtgatgatctcgtttcctggaagtgatacgctcgtttcctggaagtga

SEQ ID NO: 6557 - DNA, 149 bp, synthetic construct
  source 1..149: mol_type = other DNA
tcacttccaggaaacgtgatcttcacttccaggaaacgtacgcttcacttccaggaaacgtgccgcttcacttccaggaaacgtgcttttcacttccaggaaacgtgatcttcacttccaggaaacgtacgcttcacttccaggaaacg

SEQ ID NO: 6558 - DNA, 149 bp, synthetic construct
  source 1..149: mol_type = other DNA
cgtttcctggaagtcatgatctcgtttcctggaagtcatacgctcgtttcctggaagtcatgccgctcgtttcctggaagtcatgctttcgtttcctggaagtcatgatctcgtttcctggaagtcatacgctcgtttcctggaagtca

SEQ ID NO: 6559 - DNA, 149 bp, synthetic construct
  source 1..149: mol_type = other DNA
tgacttccaggaaacgtgatcttgacttccaggaaacgtacgcttgacttccaggaaacgtgccgcttgacttccaggaaacgtgcttttgacttccaggaaacgtgatcttgacttccaggaaacgtacgcttgacttccaggaaacg

SEQ ID NO: 6560 - DNA, 139 bp, synthetic construct
  source 1..139: mol_type = other DNA
ggtcatttgatctggtcatttacgctggtcatttgccgctggtcatttgctttggtcatttgatctggtcatttacgctggtcatttgccgctggtcatttgctttggtcatttgatctggtcatttacgctggtcatt

SEQ ID NO: 6561 - DNA, 139 bp, synthetic construct
  source 1..139: mol_type = other DNA
aatgacctgatctaatgacctacgctaatgacctgccgctaatgacctgctttaatgacctgatctaatgacctacgctaatgacctgccgctaatgacctgctttaatgacctgatctaatgacctacgctaatgacc

SEQ ID NO: 6562 - DNA, 136 bp, synthetic construct
  source 1..136: mol_type = other DNA
ccccgccctacgctccccgccctgccgctccccgccctgctttccccgccctgatctccccgccctacgctccccgccctgccgctccccgccctgctttccccgccctgatctccccgccctacgctccccgccc

SEQ ID NO: 6563 - DNA, 136 bp, synthetic construct
  source 1..136: mol_type = other DNA
gggcggggtacgctgggcggggtgccgctgggcggggtgctttgggcggggtgatctgggcggggtacgctgggcggggtgccgctgggcggggtgctttgggcggggtgatctgggcggggtacgctgggcgggg

SEQ ID NO: 6564 - DNA, 136 bp, synthetic construct
  source 1..136: mol_type = other DNA
cccctccctacgctcccctccctgccgctcccctccctgctttcccctccctgatctcccctccctacgctcccctccctgccgctcccctccctgctttcccctccctgatctcccctccctacgctcccctccc

SEQ ID NO: 6565 - DNA, 136 bp, synthetic construct
  source 1..136: mol_type = other DNA
gggaggggtacgctgggaggggtgccgctgggaggggtgctttgggaggggtgatctgggaggggtacgctgggaggggtgccgctgggaggggtgctttgggaggggtgatctgggaggggtacgctgggagggg

SEQ ID NO: 6566 - DNA, 139 bp, synthetic construct
  source 1..139: mol_type = other DNA
gcatgtttacattgctttgcatgtttacattgatctgcatgtttacattacgctgcatgtttacattgccgctgcatgtttacattgctttgcatgtttacattgatctgcatgtttacattacgctgcatgtttacat

SEQ ID NO: 6567 - DNA, 139 bp, synthetic construct
  source 1..139: mol_type = other DNA
atgtaaacatgctgctttatgtaaacatgctgatctatgtaaacatgctacgctatgtaaacatgctgccgctatgtaaacatgctgctttatgtaaacatgctgatctatgtaaacatgctacgctatgtaaacatgc

SEQ ID NO: 6568 - DNA, 139 bp, synthetic construct
  source 1..139: mol_type = other DNA
gcctgtttacattgctttgcctgtttacattgatctgcctgtttacattacgctgcctgtttacattgccgctgcctgtttacattgctttgcctgtttacattgatctgcctgtttacattacgctgcctgtttacat

SEQ ID NO: 6569 - DNA, 139 bp, synthetic construct
  source 1..139: mol_type = other DNA
atgtaaacaggctgctttatgtaaacaggctgatctatgtaaacaggctacgctatgtaaacaggctgccgctatgtaaacaggctgctttatgtaaacaggctgatctatgtaaacaggctacgctatgtaaacaggc

SEQ ID NO: 6570 - DNA, 139 bp, synthetic construct
  source 1..139: mol_type = other DNA
gcttgtttacattgctttgcttgtttacattgatctgcttgtttacattacgctgcttgtttacattgccgctgcttgtttacattgctttgcttgtttacattgatctgcttgtttacattacgctgcttgtttacat

SEQ ID NO: 6571 - DNA, 139 bp, synthetic construct
  source 1..139: mol_type = other DNA
atgtaaacaagctgctttatgtaaacaagctgatctatgtaaacaagctacgctatgtaaacaagctgccgctatgtaaacaagctgctttatgtaaacaagctgatctatgtaaacaagctacgctatgtaaacaagc

SEQ ID NO: 6572 - DNA, 139 bp, synthetic construct
  source 1..139: mol_type = other DNA
ccatgtttacattgctttccatgtttacattgatctccatgtttacattacgctccatgtttacattgccgctccatgtttacattgctttccatgtttacattgatctccatgtttacattacgctccatgtttacat

SEQ ID NO: 6573 - DNA, 139 bp, synthetic construct
  source 1..139: mol_type = other DNA
atgtaaacatggtgctttatgtaaacatggtgatctatgtaaacatggtacgctatgtaaacatggtgccgctatgtaaacatggtgctttatgtaaacatggtgatctatgtaaacatggtacgctatgtaaacatgg

SEQ ID NO: 6574 - DNA, 139 bp, synthetic construct
  source 1..139: mol_type = other DNA
ccctgtttacattgctttccctgtttacattgatctccctgtttacattacgctccctgtttacattgccgctccctgtttacattgctttccctgtttacattgatctccctgtttacattacgctccctgtttacat

SEQ ID NO: 6575 - DNA, 139 bp, synthetic construct
  source 1..139: mol_type = other DNA
atgtaaacagggtgctttatgtaaacagggtgatctatgtaaacagggtacgctatgtaaacagggtgccgctatgtaaacagggtgctttatgtaaacagggtgatctatgtaaacagggtacgctatgtaaacaggg

SEQ ID NO: 6576 - DNA, 139 bp, synthetic construct
  source 1..139: mol_type = other DNA
ccttgtttacattgctttccttgtttacattgatctccttgtttacattacgctccttgtttacattgccgctccttgtttacattgctttccttgtttacattgatctccttgtttacattacgctccttgtttacat

SEQ ID NO: 6577 - DNA, 139 bp, synthetic construct
  source 1..139: mol_type = other DNA
atgtaaacaaggtgctttatgtaaacaaggtgatctatgtaaacaaggtacgctatgtaaacaaggtgccgctatgtaaacaaggtgctttatgtaaacaaggtgatctatgtaaacaaggtacgctatgtaaacaagg

SEQ ID NO: 6578 - DNA, 139 bp, synthetic construct
  source 1..139: mol_type = other DNA
accgttatgatctaccgttatacgctaccgttatgccgctaccgttatgctttaccgttatgatctaccgttatacgctaccgttatgccgctaccgttatgctttaccgttatgatctaccgttatacgctaccgtta

SEQ ID NO: 6579 - DNA, 139 bp, synthetic construct
  source 1..139: mol_type = other DNA
taacggttgatcttaacggttacgcttaacggttgccgcttaacggttgcttttaacggttgatcttaacggttacgcttaacggttgccgcttaacggttgcttttaacggttgatcttaacggttacgcttaacggt

SEQ ID NO: 6580 - DNA, 139 bp, synthetic construct
  source 1..139: mol_type = other DNA
tccgttatgatcttccgttatacgcttccgttatgccgcttccgttatgcttttccgttatgatcttccgttatacgcttccgttatgccgcttccgttatgcttttccgttatgatcttccgttatacgcttccgtta

SEQ ID NO: 6581 - DNA, 139 bp, synthetic construct
  source 1..139: mol_type = other DNA
taacggatgatcttaacggatacgcttaacggatgccgcttaacggatgcttttaacggatgatcttaacggatacgcttaacggatgccgcttaacggatgcttttaacggatgatcttaacggatacgcttaacgga

SEQ ID NO: 6582 - DNA, 135 bp, synthetic construct
  source 1..135: mol_type = other DNA
tagggcaaaggtcatgatcttagggcaaaggtcatacgcttagggcaaaggtcatgccgcttagggcaaaggtcatgcttttagggcaaaggtcatgatcttagggcaaaggtcatacgcttagggcaaaggtca

SEQ ID NO: 6583 - DNA, 135 bp, synthetic construct
  source 1..135: mol_type = other DNA
tgacctttgccctatgatcttgacctttgccctatacgcttgacctttgccctatgccgcttgacctttgccctatgcttttgacctttgccctatgatcttgacctttgccctatacgcttgacctttgcccta

SEQ ID NO: 6584 - DNA, 146 bp, synthetic construct
  source 1..146: mol_type = other DNA
aacagctgatacgctaacagctgatgccgctaacagctgatgctttaacagctgatgatctaacagctgatacgctaacagctgatgccgctaacagctgatgctttaacagctgatgatctaacagctgatacgctaacagctga

SEQ ID NO: 6585 - DNA, 146 bp, synthetic construct
  source 1..146: mol_type = other DNA
tcagctgtttacgcttcagctgtttgccgcttcagctgtttgcttttcagctgtttgatcttcagctgtttacgcttcagctgtttgccgcttcagctgtttgcttttcagctgtttgatcttcagctgtttacgcttcagctgtt

SEQ ID NO: 6586 - DNA, 146 bp, synthetic construct
  source 1..146: mol_type = other DNA
aacagctggtacgctaacagctggtgccgctaacagctggtgctttaacagctggtgatctaacagctggtacgctaacagctggtgccgctaacagctggtgctttaacagctggtgatctaacagctggtacgctaacagctgg

SEQ ID NO: 6587 - DNA, 146 bp, synthetic construct
  source 1..146: mol_type = other DNA
ccagctgtttacgctccagctgtttgccgctccagctgtttgctttccagctgtttgatctccagctgtttacgctccagctgtttgccgctccagctgtttgctttccagctgtttgatctccagctgtttacgctccagctgtt

SEQ ID NO: 6588 - DNA, 146 bp, synthetic construct
  source 1..146: mol_type = other DNA
aacagctgttacgctaacagctgttgccgctaacagctgttgctttaacagctgttgatctaacagctgttacgctaacagctgttgccgctaacagctgttgctttaacagctgttgatctaacagctgttacgctaacagctgt

SEQ ID NO: 6589 - DNA, 146 bp, synthetic construct
  source 1..146: mol_type = other DNA
acagctgtttacgctacagctgtttgccgctacagctgtttgctttacagctgtttgatctacagctgtttacgctacagctgtttgccgctacagctgtttgctttacagctgtttgatctacagctgtttacgctacagctgtt

SEQ ID NO: 6590 - DNA, 146 bp, synthetic construct
  source 1..146: mol_type = other DNA
accagctgatacgctaccagctgatgccgctaccagctgatgctttaccagctgatgatctaccagctgatacgctaccagctgatgccgctaccagctgatgctttaccagctgatgatctaccagctgatacgctaccagctga

SEQ ID NO: 6591 - DNA, 146 bp, synthetic construct
  source 1..146: mol_type = other DNA
tcagctggttacgcttcagctggttgccgcttcagctggttgcttttcagctggttgatcttcagctggttacgcttcagctggttgccgcttcagctggttgcttttcagctggttgatcttcagctggttacgcttcagctggt

SEQ ID NO: 6592 - DNA, 146 bp, synthetic construct
  source 1..146: mol_type = other DNA
accagctggtacgctaccagctggtgccgctaccagctggtgctttaccagctggtgatctaccagctggtacgctaccagctggtgccgctaccagctggtgctttaccagctggtgatctaccagctggtacgctaccagctgg

SEQ ID NO: 6593 - DNA, 146 bp, synthetic construct
  source 1..146: mol_type = other DNA
ccagctggttacgctccagctggttgccgctccagctggttgctttccagctggttgatctccagctggttacgctccagctggttgccgctccagctggttgctttccagctggttgatctccagctggttacgctccagctggt

SEQ ID NO: 6594 - DNA, 146 bp, synthetic construct
  source 1..146: mol_type = other DNA
accagctgttacgctaccagctgttgccgctaccagctgttgctttaccagctgttgatctaccagctgttacgctaccagctgttgccgctaccagctgttgctttaccagctgttgatctaccagctgttacgctaccagctgt

SEQ ID NO: 6595 - DNA, 146 bp, synthetic construct
  source 1..146: mol_type = other DNA
acagctggttacgctacagctggttgccgctacagctggttgctttacagctggttgatctacagctggttacgctacagctggttgccgctacagctggttgctttacagctggttgatctacagctggttacgctacagctggt

SEQ ID NO: 6596 - DNA, 146 bp, synthetic construct
  source 1..146: mol_type = other DNA
atcagctgatacgctatcagctgatgccgctatcagctgatgctttatcagctgatgatctatcagctgatacgctatcagctgatgccgctatcagctgatgctttatcagctgatgatctatcagctgatacgctatcagctga

SEQ ID NO: 6597 - DNA, 146 bp, synthetic construct
  source 1..146: mol_type = other DNA
tcagctgattacgcttcagctgattgccgcttcagctgattgcttttcagctgattgatcttcagctgattacgcttcagctgattgccgcttcagctgattgcttttcagctgattgatcttcagctgattacgcttcagctgat

SEQ ID NO: 6598 - DNA, 146 bp, synthetic construct
  source 1..146: mol_type = other DNA
atcagctggtacgctatcagctggtgccgctatcagctggtgctttatcagctggtgatctatcagctggtacgctatcagctggtgccgctatcagctggtgctttatcagctggtgatctatcagctggtacgctatcagctgg

SEQ ID NO: 6599 - DNA, 146 bp, synthetic construct
  source 1..146: mol_type = other DNA
ccagctgattacgctccagctgattgccgctccagctgattgctttccagctgattgatctccagctgattacgctccagctgattgccgctccagctgattgctttccagctgattgatctccagctgattacgctccagctgat

SEQ ID NO: 6600 - DNA, 146 bp, synthetic construct
  source 1..146: mol_type = other DNA
atcagctgttacgctatcagctgttgccgctatcagctgttgctttatcagctgttgatctatcagctgttacgctatcagctgttgccgctatcagctgttgctttatcagctgttgatctatcagctgttacgctatcagctgt

SEQ ID NO: 6601 - DNA, 146 bp, synthetic construct
  source 1..146: mol_type = other DNA
acagctgattacgctacagctgattgccgctacagctgattgctttacagctgattgatctacagctgattacgctacagctgattgccgctacagctgattgctttacagctgattgatctacagctgattacgctacagctgat

SEQ ID NO: 6602 - DNA, 125 bp, synthetic construct
  source 1..125: mol_type = other DNA
actcgtattcgtgttacttctgccgctactcgtattcgtgttacttctgctttactcgtattcgtgttacttctgatctactcgtattcgtgttacttctacgctactcgtattcgtgttacttc

SEQ ID NO: 6603 - DNA, 125 bp, synthetic construct
  source 1..125: mol_type = other DNA
gaagtaacacgaatacgagttgccgctgaagtaacacgaatacgagttgctttgaagtaacacgaatacgagttgatctgaagtaacacgaatacgagttacgctgaagtaacacgaatacgagt

SEQ ID NO: 6604 - DNA, 125 bp, synthetic construct
  source 1..125: mol_type = other DNA
actcttattcgtgttacttctgccgctactcttattcgtgttacttctgctttactcttattcgtgttacttctgatctactcttattcgtgttacttctacgctactcttattcgtgttacttc

SEQ ID NO: 6605 - DNA, 125 bp, synthetic construct
  source 1..125: mol_type = other DNA
gaagtaacacgaataagagttgccgctgaagtaacacgaataagagttgctttgaagtaacacgaataagagttgatctgaagtaacacgaataagagttacgctgaagtaacacgaataagagt

SEQ ID NO: 6606 - DNA, 125 bp, synthetic construct
  source 1..125: mol_type = other DNA
acttgtattcgtgttacttctgccgctacttgtattcgtgttacttctgctttacttgtattcgtgttacttctgatctacttgtattcgtgttacttctacgctacttgtattcgtgttacttc

SEQ ID NO: 6607 - DNA, 125 bp, synthetic construct
  source 1..125: mol_type = other DNA
gaagtaacacgaatacaagttgccgctgaagtaacacgaatacaagttgctttgaagtaacacgaatacaagttgatctgaagtaacacgaatacaagttacgctgaagtaacacgaatacaagt

SEQ ID NO: 6608 - DNA, 125 bp, synthetic construct
  source 1..125: mol_type = other DNA
acttttattcgtgttacttctgccgctacttttattcgtgttacttctgctttacttttattcgtgttacttctgatctacttttattcgtgttacttctacgctacttttattcgtgttacttc

SEQ ID NO: 6609 - DNA, 125 bp, synthetic construct
  source 1..125: mol_type = other DNA
gaagtaacacgaataaaagttgccgctgaagtaacacgaataaaagttgctttgaagtaacacgaataaaagttgatctgaagtaacacgaataaaagttacgctgaagtaacacgaataaaagt

SEQ ID NO: 6610 - DNA, 146 bp, synthetic construct
  source 1..146: mol_type = other DNA
cagataaggtacgctcagataaggtgccgctcagataaggtgctttcagataaggtgatctcagataaggtacgctcagataaggtgccgctcagataaggtgctttcagataaggtgatctcagataaggtacgctcagataagg

SEQ ID NO: 6611 - DNA, 146 bp, synthetic construct
  source 1..146: mol_type = other DNA
ccttatctgtacgctccttatctgtgccgctccttatctgtgctttccttatctgtgatctccttatctgtacgctccttatctgtgccgctccttatctgtgctttccttatctgtgatctccttatctgtacgctccttatctg

SEQ ID NO: 6612 - DNA, 149 bp, synthetic construct
  source 1..149: mol_type = other DNA
ggggggagcgtccccctgatctggggggagcgtccccctacgctggggggagcgtccccctgccgctggggggagcgtccccctgctttggggggagcgtccccctgatctggggggagcgtccccctacgctggggggagcgtccccc

SEQ ID NO: 6613 - DNA, 149 bp, synthetic construct
  source 1..149: mol_type = other DNA
gggggacgctcccccctgatctgggggacgctcccccctacgctgggggacgctcccccctgccgctgggggacgctcccccctgctttgggggacgctcccccctgatctgggggacgctcccccctacgctgggggacgctcccccc

SEQ ID NO: 6614 - DNA, 149 bp, synthetic construct
  source 1..149: mol_type = other DNA
ggggggggcgtccccctgatctggggggggcgtccccctacgctggggggggcgtccccctgccgctggggggggcgtccccctgctttggggggggcgtccccctgatctggggggggcgtccccctacgctggggggggcgtccccc

SEQ ID NO: 6615 - DNA, 149 bp, synthetic construct
  source 1..149: mol_type = other DNA
gggggacgcccccccctgatctgggggacgcccccccctacgctgggggacgcccccccctgccgctgggggacgcccccccctgctttgggggacgcccccccctgatctgggggacgcccccccctacgctgggggacgcccccccc

SEQ ID NO: 6616 - DNA, 149 bp, synthetic construct
  source 1..149: mol_type = other DNA
ggtgggagcgtccccctgatctggtgggagcgtccccctacgctggtgggagcgtccccctgccgctggtgggagcgtccccctgctttggtgggagcgtccccctgatctggtgggagcgtccccctacgctggtgggagcgtccccc

SEQ ID NO: 6617 - DNA, 149 bp, synthetic construct
  source 1..149: mol_type = other DNA
gggggacgctcccacctgatctgggggacgctcccacctacgctgggggacgctcccacctgccgctgggggacgctcccacctgctttgggggacgctcccacctgatctgggggacgctcccacctacgctgggggacgctcccacc

SEQ ID NO: 6618 - DNA, 149 bp, synthetic construct
  source 1..149: mol_type = other DNA
ggtgggggcgtccccctgatctggtgggggcgtccccctacgctggtgggggcgtccccctgccgctggtgggggcgtccccctgctttggtgggggcgtccccctgatctggtgggggcgtccccctacgctggtgggggcgtccccc

SEQ ID NO: 6619 - DNA, 149 bp, synthetic construct
  source 1..149: mol_type = other DNA
gggggacgcccccacctgatctgggggacgcccccacctacgctgggggacgcccccacctgccgctgggggacgcccccacctgctttgggggacgcccccacctgatctgggggacgcccccacctacgctgggggacgcccccacc

SEQ ID NO: 6620 - DNA, 136 bp, synthetic construct
  source 1..136: mol_type = other DNA
tgccagcctacgcttgccagcctgccgcttgccagcctgcttttgccagcctgatcttgccagcctacgcttgccagcctgccgcttgccagcctgcttttgccagcctgatcttgccagcctacgcttgccagcc

SEQ ID NO: 6621 - DNA, 136 bp, synthetic construct
  source 1..136: mol_type = other DNA
ggctggcatacgctggctggcatgccgctggctggcatgctttggctggcatgatctggctggcatacgctggctggcatgccgctggctggcatgctttggctggcatgatctggctggcatacgctggctggca

SEQ ID NO: 6622 - DNA, 136 bp, synthetic construct
  source 1..136: mol_type = other DNA
tgccagcgtacgcttgccagcgtgccgcttgccagcgtgcttttgccagcgtgatcttgccagcgtacgcttgccagcgtgccgcttgccagcgtgcttttgccagcgtgatcttgccagcgtacgcttgccagcg

SEQ ID NO: 6623 - DNA, 136 bp, synthetic construct
  source 1..136: mol_type = other DNA
cgctggcatacgctcgctggcatgccgctcgctggcatgctttcgctggcatgatctcgctggcatacgctcgctggcatgccgctcgctggcatgctttcgctggcatgatctcgctggcatacgctcgctggca

SEQ ID NO: 6624 - DNA, 136 bp, synthetic construct
  source 1..136: mol_type = other DNA
tgccagcttacgcttgccagcttgccgcttgccagcttgcttttgccagcttgatcttgccagcttacgcttgccagcttgccgcttgccagcttgcttttgccagcttgatcttgccagcttacgcttgccagct

SEQ ID NO: 6625 - DNA, 136 bp, synthetic construct
  source 1..136: mol_type = other DNA
agctggcatacgctagctggcatgccgctagctggcatgctttagctggcatgatctagctggcatacgctagctggcatgccgctagctggcatgctttagctggcatgatctagctggcatacgctagctggca

SEQ ID NO: 6626 - DNA, 147 bp, synthetic construct
  source 1..147: mol_type = other DNA
tgtccgtctgtcctgcttttgtccgtctgtcctgatcttgtccgtctgtcctacgcttgtccgtctgtcctgccgcttgtccgtctgtcctgcttttgtccgtctgtcctgatcttgtccgtctgtcctacgcttgtccgtctgtcc

SEQ ID NO: 6627 - DNA, 147 bp, synthetic construct
  source 1..147: mol_type = other DNA
ggacagacggacatgctttggacagacggacatgatctggacagacggacatacgctggacagacggacatgccgctggacagacggacatgctttggacagacggacatgatctggacagacggacatacgctggacagacggaca

SEQ ID NO: 6628 - DNA, 147 bp, synthetic construct
  source 1..147: mol_type = other DNA
tgtctgtctgtcctgcttttgtctgtctgtcctgatcttgtctgtctgtcctacgcttgtctgtctgtcctgccgcttgtctgtctgtcctgcttttgtctgtctgtcctgatcttgtctgtctgtcctacgcttgtctgtctgtcc

SEQ ID NO: 6629 - DNA, 147 bp, synthetic construct
  source 1..147: mol_type = other DNA
ggacagacagacatgctttggacagacagacatgatctggacagacagacatacgctggacagacagacatgccgctggacagacagacatgctttggacagacagacatgatctggacagacagacatacgctggacagacagaca

SEQ ID NO: 6630 - DNA, 135 bp, synthetic construct
  source 1..135: mol_type = other DNA
ggcaatcactcgcctgatctggcaatcactcgcctacgctggcaatcactcgcctgccgctggcaatcactcgcctgctttggcaatcactcgcctgatctggcaatcactcgcctacgctggcaatcactcgcc

SEQ ID NO: 6631 - DNA, 135 bp, synthetic construct
  source 1..135: mol_type = other DNA
ggcgagtgattgcctgatctggcgagtgattgcctacgctggcgagtgattgcctgccgctggcgagtgattgcctgctttggcgagtgattgcctgatctggcgagtgattgcctacgctggcgagtgattgcc

SEQ ID NO: 6632 - DNA, 135 bp, synthetic construct
  source 1..135: mol_type = other DNA
ggcaatcacttgcctgatctggcaatcacttgcctacgctggcaatcacttgcctgccgctggcaatcacttgcctgctttggcaatcacttgcctgatctggcaatcacttgcctacgctggcaatcacttgcc

SEQ ID NO: 6633 - DNA, 135 bp, synthetic construct
  source 1..135: mol_type = other DNA
ggcaagtgattgcctgatctggcaagtgattgcctacgctggcaagtgattgcctgccgctggcaagtgattgcctgctttggcaagtgattgcctgatctggcaagtgattgcctacgctggcaagtgattgcc

SEQ ID NO: 6634 - DNA, 135 bp, synthetic construct
  source 1..135: mol_type = other DNA
ggcagtcactcgcctgatctggcagtcactcgcctacgctggcagtcactcgcctgccgctggcagtcactcgcctgctttggcagtcactcgcctgatctggcagtcactcgcctacgctggcagtcactcgcc

SEQ ID NO: 6635 - DNA, 135 bp, synthetic construct
  source 1..135: mol_type = other DNA
ggcgagtgactgcctgatctggcgagtgactgcctacgctggcgagtgactgcctgccgctggcgagtgactgcctgctttggcgagtgactgcctgatctggcgagtgactgcctacgctggcgagtgactgcc

SEQ ID NO: 6636 - DNA, 135 bp, synthetic construct
  source 1..135: mol_type = other DNA
ggcagtcacttgcctgatctggcagtcacttgcctacgctggcagtcacttgcctgccgctggcagtcacttgcctgctttggcagtcacttgcctgatctggcagtcacttgcctacgctggcagtcacttgcc

SEQ ID NO: 6637 - DNA, 135 bp, synthetic construct
  source 1..135: mol_type = other DNA
ggcaagtgactgcctgatctggcaagtgactgcctacgctggcaagtgactgcctgccgctggcaagtgactgcctgctttggcaagtgactgcctgatctggcaagtgactgcctacgctggcaagtgactgcc

SEQ ID NO: 6638 - DNA, 135 bp, synthetic construct
  source 1..135: mol_type = other DNA
ggcgatcactcgcctgatctggcgatcactcgcctacgctggcgatcactcgcctgccgctggcgatcactcgcctgctttggcgatcactcgcctgatctggcgatcactcgcctacgctggcgatcactcgcc

SEQ ID NO: 6639 - DNA, 135 bp, synthetic construct
  source 1..135: mol_type = other DNA
ggcgagtgatcgcctgatctggcgagtgatcgcctacgctggcgagtgatcgcctgccgctggcgagtgatcgcctgctttggcgagtgatcgcctgatctggcgagtgatcgcctacgctggcgagtgatcgcc

SEQ ID NO: 6640 - DNA, 135 bp, synthetic construct
  source 1..135: mol_type = other DNA
ggcgatcacttgcctgatctggcgatcacttgcctacgctggcgatcacttgcctgccgctggcgatcacttgcctgctttggcgatcacttgcctgatctggcgatcacttgcctacgctggcgatcacttgcc

SEQ ID NO: 6641 - DNA, 135 bp, synthetic construct
  source 1..135: mol_type = other DNA
ggcaagtgatcgcctgatctggcaagtgatcgcctacgctggcaagtgatcgcctgccgctggcaagtgatcgcctgctttggcaagtgatcgcctgatctggcaagtgatcgcctacgctggcaagtgatcgcc

SEQ ID NO: 6642 - DNA, 135 bp, synthetic construct
  source 1..135: mol_type = other DNA
ggcggtcactcgcctgatctggcggtcactcgcctacgctggcggtcactcgcctgccgctggcggtcactcgcctgctttggcggtcactcgcctgatctggcggtcactcgcctacgctggcggtcactcgcc

SEQ ID NO: 6643 - DNA, 135 bp, synthetic construct
  source 1..135: mol_type = other DNA
ggcgagtgaccgcctgatctggcgagtgaccgcctacgctggcgagtgaccgcctgccgctggcgagtgaccgcctgctttggcgagtgaccgcctgatctggcgagtgaccgcctacgctggcgagtgaccgcc

SEQ ID NO: 6644 - DNA, 135 bp, synthetic construct
  source 1..135: mol_type = other DNA
ggcggtcacttgcctgatctggcggtcacttgcctacgctggcggtcacttgcctgccgctggcggtcacttgcctgctttggcggtcacttgcctgatctggcggtcacttgcctacgctggcggtcacttgcc

SEQ ID NO: 6645 - DNA, 135 bp, synthetic construct
  source 1..135: mol_type = other DNA
ggcaagtgaccgcctgatctggcaagtgaccgcctacgctggcaagtgaccgcctgccgctggcaagtgaccgcctgctttggcaagtgaccgcctgatctggcaagtgaccgcctacgctggcaagtgaccgcc

SEQ ID NO: 6646 - DNA, 139 bp, synthetic construct
  source 1..139: mol_type = other DNA
gtcagcatgatctgtcagcatacgctgtcagcatgccgctgtcagcatgctttgtcagcatgatctgtcagcatacgctgtcagcatgccgctgtcagcatgctttgtcagcatgatctgtcagcatacgctgtcagca

SEQ ID NO: 6647 - DNA, 139 bp, synthetic construct
  source 1..139: mol_type = other DNA
tgctgactgatcttgctgactacgcttgctgactgccgcttgctgactgcttttgctgactgatcttgctgactacgcttgctgactgccgcttgctgactgcttttgctgactgatcttgctgactacgcttgctgac

SEQ ID NO: 6648 - DNA, 139 bp, synthetic construct
  source 1..139: mol_type = other DNA
agcagctgctgctgctttagcagctgctgctgatctagcagctgctgctacgctagcagctgctgctgccgctagcagctgctgctgctttagcagctgctgctgatctagcagctgctgctacgctagcagctgctgc

SEQ ID NO: 6649 - DNA, 139 bp, synthetic construct
  source 1..139: mol_type = other DNA
gcagcagctgcttgctttgcagcagctgcttgatctgcagcagctgcttacgctgcagcagctgcttgccgctgcagcagctgcttgctttgcagcagctgcttgatctgcagcagctgcttacgctgcagcagctgct

SEQ ID NO: 6650 - DNA, 140 bp, synthetic construct
  source 1..140: mol_type = other DNA
cggtttcaaatgccgctcggtttcaaatgctttcggtttcaaatgatctcggtttcaaatacgctcggtttcaaatgccgctcggtttcaaatgctttcggtttcaaatgatctcggtttcaaatacgctcggtttcaaa

SEQ ID NO: 6651 - DNA, 140 bp, synthetic construct
  source 1..140: mol_type = other DNA
tttgaaaccgtgccgcttttgaaaccgtgcttttttgaaaccgtgatcttttgaaaccgtacgcttttgaaaccgtgccgcttttgaaaccgtgcttttttgaaaccgtgatcttttgaaaccgtacgcttttgaaaccg

SEQ ID NO: 6652 - DNA, 139 bp, synthetic construct; identical to SEQ ID NO: 6468
  source 1..139: mol_type = other DNA

SEQ ID NO: 6653 - DNA, 139 bp, synthetic construct; identical to SEQ ID NO: 6469
  source 1..139: mol_type = other DNA

SEQ ID NO: 6654 - DNA, 139 bp, synthetic construct
  source 1..139: mol_type = other DNA
agataagtgatctagataagtacgctagataagtgccgctagataagtgctttagataagtgatctagataagtacgctagataagtgccgctagataagtgctttagataagtgatctagataagtacgctagataag

SEQ ID NO: 6655 - DNA, 139 bp, synthetic construct
  source 1..139: mol_type = other DNA
cttatcttgatctcttatcttacgctcttatcttgccgctcttatcttgctttcttatcttgatctcttatcttacgctcttatcttgccgctcttatcttgctttcttatcttgatctcttatcttacgctcttatct

SEQ ID NO: 6656 - DNA, 139 bp, synthetic construct
  source 1..139: mol_type = other DNA
tgataagtgatcttgataagtacgcttgataagtgccgcttgataagtgcttttgataagtgatcttgataagtacgcttgataagtgccgcttgataagtgcttttgataagtgatcttgataagtacgcttgataag

SEQ ID NO: 6657 - DNA, 139 bp, synthetic construct
  source 1..139: mol_type = other DNA
cttatcatgatctcttatcatacgctcttatcatgccgctcttatcatgctttcttatcatgatctcttatcatacgctcttatcatgccgctcttatcatgctttcttatcatgatctcttatcatacgctcttatca

SEQ ID NO: 6658 - DNA, 140 bp, synthetic construct
  source 1..140: mol_type = other DNA
ttccagagaatgccgctttccagagaatgctttttccagagaatgatctttccagagaatacgctttccagagaatgccgctttccagagaatgctttttccagagaatgatctttccagagaatacgctttccagagaa

SEQ ID NO: 6659 - DNA, 140 bp, synthetic construct
  source 1..140: mol_type = other DNA
ttctctggaatgccgctttctctggaatgctttttctctggaatgatctttctctggaatacgctttctctggaatgccgctttctctggaatgctttttctctggaatgatctttctctggaatacgctttctctggaa

SEQ ID NO: 6660 - DNA, 140 bp, synthetic construct
  source 1..140: mol_type = other DNA
ttccacagaatgccgctttccacagaatgctttttccacagaatgatctttccacagaatacgctttccacagaatgccgctttccacagaatgctttttccacagaatgatctttccacagaatacgctttccacagaa

SEQ ID NO: 6661 - DNA, 140 bp, synthetic construct
  source 1..140: mol_type = other DNA
ttctgtggaatgccgctttctgtggaatgctttttctgtggaatgatctttctgtggaatacgctttctgtggaatgccgctttctgtggaatgctttttctgtggaatgatctttctgtggaatacgctttctgtggaa

SEQ ID NO: 6662 - DNA, 140 bp, synthetic construct
  source 1..140: mol_type = other DNA
ttcctgagaatgccgctttcctgagaatgctttttcctgagaatgatctttcctgagaatacgctttcctgagaatgccgctttcctgagaatgctttttcctgagaatgatctttcctgagaatacgctttcctgagaa

SEQ ID NO: 6663 - DNA, 140 bp, synthetic construct
  source 1..140: mol_type = other DNA
ttctcaggaatgccgctttctcaggaatgctttttctcaggaatgatctttctcaggaatacgctttctcaggaatgccgctttctcaggaatgctttttctcaggaatgatctttctcaggaatacgctttctcaggaa

SEQ ID NO: 6664 - DNA, 140 bp, synthetic construct
  source 1..140: mol_type = other DNA
ttcctcagaatgccgctttcctcagaatgctttttcctcagaatgatctttcctcagaatacgctttcctcagaatgccgctttcctcagaatgctttttcctcagaatgatctttcctcagaatacgctttcctcagaa

SEQ ID NO: 6665 - DNA, 140 bp, synthetic construct
  source 1..140: mol_type = other DNA
ttctgaggaatgccgctttctgaggaatgctttttctgaggaatgatctttctgaggaatacgctttctgaggaatgccgctttctgaggaatgctttttctgaggaatgatctttctgaggaatacgctttctgaggaa

SEQ ID NO: 6666 - DNA, 146 bp, synthetic construct
  source 1..146: mol_type = other DNA
accggaagttacgctaccggaagttgccgctaccggaagttgctttaccggaagttgatctaccggaagttacgctaccggaagttgccgctaccggaagttgctttaccggaagttgatctaccggaagttacgctaccggaagt

SEQ ID NO: 6667 - DNA, 146 bp, synthetic construct
  source 1..146: mol_type = other DNA
acttccggttacgctacttccggttgccgctacttccggttgctttacttccggttgatctacttccggttacgctacttccggttgccgctacttccggttgctttacttccggttgatctacttccggttacgctacttccggt

SEQ ID NO: 6668 - DNA, 133 bp, synthetic construct
  source 1..133: mol_type = other DNA
taattggcatttaattgtacgcttaattggcatttaattgtgccgcttaattggcatttaattgtgcttttaattggcatttaattgtgatcttaattggcatttaattgtacgcttaattggcatttaattg

SEQ ID NO: 6669 - DNA, 133 bp, synthetic construct
  source 1..133: mol_type = other DNA
caattaaatgccaattatacgctcaattaaatgccaattatgccgctcaattaaatgccaattatgctttcaattaaatgccaattatgatctcaattaaatgccaattatacgctcaattaaatgccaatta

SEQ ID NO: 6670 - DNA, 133 bp, synthetic construct
  source 1..133: mol_type = other DNA
taattgccatttaattgtacgcttaattgccatttaattgtgccgcttaattgccatttaattgtgcttttaattgccatttaattgtgatcttaattgccatttaattgtacgcttaattgccatttaattg

SEQ ID NO: 6671 - DNA, 133 bp, synthetic construct
  source 1..133: mol_type = other DNA
caattaaatggcaattatacgctcaattaaatggcaattatgccgctcaattaaatggcaattatgctttcaattaaatggcaattatgatctcaattaaatggcaattatacgctcaattaaatggcaatta

SEQ ID NO: 6672 - DNA, 142 bp, synthetic construct
  source 1..142: mol_type = other DNA
tgacaaaaaccagactgatcttgacaaaaaccagactacgcttgacaaaaaccagactgccgcttgacaaaaaccagactgcttttgacaaaaaccagactgatcttgacaaaaaccagactacgcttgacaaaaaccagac

SEQ ID NO: 6673 - DNA, 142 bp, synthetic construct
  source 1..142: mol_type = other DNA
gtctggtttttgtcatgatctgtctggtttttgtcatacgctgtctggtttttgtcatgccgctgtctggtttttgtcatgctttgtctggtttttgtcatgatctgtctggtttttgtcatacgctgtctggtttttgtca

SEQ ID NO: 6674 - DNA, 142 bp, synthetic construct
  source 1..142: mol_type = other DNA
tgacaaaaaccaggctgatcttgacaaaaaccaggctacgcttgacaaaaaccaggctgccgcttgacaaaaaccaggctgcttttgacaaaaaccaggctgatcttgacaaaaaccaggctacgcttgacaaaaaccaggc

SEQ ID NO: 6675 - DNA, 142 bp, synthetic construct
  source 1..142: mol_type = other DNA
gcctggtttttgtcatgatctgcctggtttttgtcatacgctgcctggtttttgtcatgccgctgcctggtttttgtcatgctttgcctggtttttgtcatgatctgcctggtttttgtcatacgctgcctggtttttgtca

SEQ ID NO: 6676 - DNA, 142 bp, synthetic construct
  source 1..142: mol_type = other DNA
tgacaaaagccagactgatcttgacaaaagccagactacgcttgacaaaagccagactgccgcttgacaaaagccagactgcttttgacaaaagccagactgatcttgacaaaagccagactacgcttgacaaaagccagac

SEQ ID NO: 6677 - DNA, 142 bp, synthetic construct
  source 1..142: mol_type = other DNA
gtctggcttttgtcatgatctgtctggcttttgtcatacgctgtctggcttttgtcatgccgctgtctggcttttgtcatgctttgtctggcttttgtcatgatctgtctggcttttgtcatacgctgtctggcttttgtca

SEQ ID NO: 6678 - DNA, 142 bp, synthetic construct
  source 1..142: mol_type = other DNA
tgacaaaagccaggctgatcttgacaaaagccaggctacgcttgacaaaagccaggctgccgcttgacaaaagccaggctgcttttgacaaaagccaggctgatcttgacaaaagccaggctacgcttgacaaaagccaggc

SEQ ID NO: 6679 - DNA, 142 bp, synthetic construct
  source 1..142: mol_type = other DNA
gcctggcttttgtcatgatctgcctggcttttgtcatacgctgcctggcttttgtcatgccgctgcctggcttttgtcatgctttgcctggcttttgtcatgatctgcctggcttttgtcatacgctgcctggcttttgtca

SEQ ID NO: 6680 - DNA, 142 bp, synthetic construct
  source 1..142: mol_type = other DNA
tgacaaagaccagactgatcttgacaaagaccagactacgcttgacaaagaccagactgccgcttgacaaagaccagactgcttttgacaaagaccagactgatcttgacaaagaccagactacgcttgacaaagaccagac

SEQ ID NO: 6681 - DNA, 142 bp, synthetic construct
  source 1..142: mol_type = other DNA
gtctggtctttgtcatgatctgtctggtctttgtcatacgctgtctggtctttgtcatgccgctgtctggtctttgtcatgctttgtctggtctttgtcatgatctgtctggtctttgtcatacgctgtctggtctttgtca

SEQ ID NO: 6682 - DNA, 142 bp, synthetic construct
  source 1..142: mol_type = other DNA
tgacaaagaccaggctgatcttgacaaagaccaggctacgcttgacaaagaccaggctgccgcttgacaaagaccaggctgcttttgacaaagaccaggctgatcttgacaaagaccaggctacgcttgacaaagaccaggc

SEQ ID NO: 6683 - DNA, 142 bp, synthetic construct
  source 1..142: mol_type = other DNA
gcctggtctttgtcatgatctgcctggtctttgtcatacgctgcctggtctttgtcatgccgctgcctggtctttgtcatgctttgcctggtctttgtcatgatctgcctggtctttgtcatacgctgcctggtctttgtca

SEQ ID NO: 6684 - DNA, 142 bp, synthetic construct
  source 1..142: mol_type = other DNA
tgacaaaggccagactgatcttgacaaaggccagactacgcttgacaaaggccagactgccgcttgacaaaggccagactgcttttgacaaaggccagactgatcttgacaaaggccagactacgcttgacaaaggccagac

SEQ ID NO: 6685 - DNA, 142 bp, synthetic construct
  source 1..142: mol_type = other DNA
gtctggcctttgtcatgatctgtctggcctttgtcatacgctgtctggcctttgtcatgccgctgtctggcctttgtcatgctttgtctggcctttgtcatgatctgtctggcctttgtcatacgctgtctggcctttgtca

SEQ ID NO: 6686 - DNA, 142 bp, synthetic construct
  source 1..142: mol_type = other DNA
tgacaaaggccaggctgatcttgacaaaggccaggctacgcttgacaaaggccaggctgccgcttgacaaaggccaggctgcttttgacaaaggccaggctgatcttgacaaaggccaggctacgcttgacaaaggccaggc

SEQ ID NO: 6687 - DNA, 142 bp, synthetic construct
  source 1..142: mol_type = other DNA
gcctggcctttgtcatgatctgcctggcctttgtcatacgctgcctggcctttgtcatgccgctgcctggcctttgtcatgctttgcctggcctttgtcatgatctgcctggcctttgtcatacgctgcctggcctttgtca

SEQ ID NO: 6688 - DNA, 139 bp, synthetic construct
  source 1..139: mol_type = other DNA
taattggaatttaattgctacgcttaattggaatttaattgctgccgcttaattggaatttaattgctgcttttaattggaatttaattgctgatcttaattggaatttaattgctacgcttaattggaatttaattgc

SEQ ID NO: 6689 - DNA, 139 bp, synthetic construct
  source 1..139: mol_type = other DNA
gcaattaaattccaattatacgctgcaattaaattccaattatgccgctgcaattaaattccaattatgctttgcaattaaattccaattatgatctgcaattaaattccaattatacgctgcaattaaattccaatta

SEQ ID NO: 6690 - DNA, 139 bp, synthetic construct
  source 1..139: mol_type = other DNA
taattggattttaattgctacgcttaattggattttaattgctgccgcttaattggattttaattgctgcttttaattggattttaattgctgatcttaattggattttaattgctacgcttaattggattttaattgc

SEQ ID NO: 6691 - DNA, 139 bp, synthetic construct
  source 1..139: mol_type = other DNA
gcaattaaaatccaattatacgctgcaattaaaatccaattatgccgctgcaattaaaatccaattatgctttgcaattaaaatccaattatgatctgcaattaaaatccaattatacgctgcaattaaaatccaatta

SEQ ID NO: 6692 - DNA, 139 bp, synthetic construct
  source 1..139: mol_type = other DNA
taattggtatttaattgctacgcttaattggtatttaattgctgccgcttaattggtatttaattgctgcttttaattggtatttaattgctgatcttaattggtatttaattgctacgcttaattggtatttaattgc

SEQ ID NO: 6693 - DNA, 139 bp, synthetic construct
  source 1..139: mol_type = other DNA
gcaattaaataccaattatacgctgcaattaaataccaattatgccgctgcaattaaataccaattatgctttgcaattaaataccaattatgatctgcaattaaataccaattatacgctgcaattaaataccaatta

SEQ ID NO: 6694 - DNA, 139 bp, synthetic construct
  source 1..139: mol_type = other DNA
taattggtttttaattgctacgcttaattggtttttaattgctgccgcttaattggtttttaattgctgcttttaattggtttttaattgctgatcttaattggtttttaattgctacgcttaattggtttttaattgc

SEQ ID NO: 6695 - DNA, 139 bp, synthetic construct
  source 1..139: mol_type = other DNA
gcaattaaaaaccaattatacgctgcaattaaaaaccaattatgccgctgcaattaaaaaccaattatgctttgcaattaaaaaccaattatgatctgcaattaaaaaccaattatacgctgcaattaaaaaccaatta

SEQ ID NO: 6696 - DNA, 139 bp, synthetic construct
  source 1..139: mol_type = other DNA
taattgcaatttaattgctacgcttaattgcaatttaattgctgccgcttaattgcaatttaattgctgcttttaattgcaatttaattgctgatcttaattgcaatttaattgctacgcttaattgcaatttaattgc

SEQ ID NO: 6697 - DNA, 139 bp, synthetic construct
  source 1..139: mol_type = other DNA
gcaattaaattgcaattatacgctgcaattaaattgcaattatgccgctgcaattaaattgcaattatgctttgcaattaaattgcaattatgatctgcaattaaattgcaattatacgctgcaattaaattgcaatta

SEQ ID NO: 6698 - DNA, 139 bp, synthetic construct
  source 1..139: mol_type = other DNA
taattgcattttaattgctacgcttaattgcattttaattgctgccgcttaattgcattttaattgctgcttttaattgcattttaattgctgatcttaattgcattttaattgctacgcttaattgcattttaattgc

SEQ ID NO: 6699 - DNA, 139 bp, synthetic construct
  source 1..139: mol_type = other DNA
gcaattaaaatgcaattatacgctgcaattaaaatgcaattatgccgctgcaattaaaatgcaattatgctttgcaattaaaatgcaattatgatctgcaattaaaatgcaattatacgctgcaattaaaatgcaatta

SEQ ID NO: 6700 - DNA, 139 bp, synthetic construct
  source 1..139: mol_type = other DNA
taattgctatttaattgctacgcttaattgctatttaattgctgccgcttaattgctatttaattgctgcttttaattgctatttaattgctgatcttaattgctatttaattgctacgcttaattgctatttaattgc

SEQ ID NO: 6701 - DNA, 139 bp, synthetic construct
  source 1..139: mol_type = other DNA
gcaattaaatagcaattatacgctgcaattaaatagcaattatgccgctgcaattaaatagcaattatgctttgcaattaaatagcaattatgatctgcaattaaatagcaattatacgctgcaattaaatagcaatta

SEQ ID NO: 6702 - DNA, 139 bp, synthetic construct
  source 1..139: mol_type = other DNA
taattgctttttaattgctacgcttaattgctttttaattgctgccgcttaattgctttttaattgctgcttttaattgctttttaattgctgatcttaattgctttttaattgctacgcttaattgctttttaattgc

SEQ ID NO: 6703 - DNA, 139 bp, synthetic construct
  source 1..139: mol_type = other DNA
gcaattaaaaagcaattatacgctgcaattaaaaagcaattatgccgctgcaattaaaaagcaattatgctttgcaattaaaaagcaattatgatctgcaattaaaaagcaattatacgctgcaattaaaaagcaatta

SEQ ID NO: 6704 - DNA, 136 bp, synthetic construct
  source 1..136: mol_type = other DNA
gccaatgatacgctgccaatgatgccgctgccaatgatgctttgccaatgatgatctgccaatgatacgctgccaatgatgccgctgccaatgatgctttgccaatgatgatctgccaatgatacgctgccaatga

SEQ ID NO: 6705 - DNA, 136 bp, synthetic construct
  source 1..136: mol_type = other DNA
tcattggctacgcttcattggctgccgcttcattggctgcttttcattggctgatcttcattggctacgcttcattggctgccgcttcattggctgcttttcattggctgatcttcattggctacgcttcattggc

SEQ ID NO: 6706 - DNA, 136 bp, synthetic construct
  source 1..136: mol_type = other DNA
gccaatggtacgctgccaatggtgccgctgccaatggtgctttgccaatggtgatctgccaatggtacgctgccaatggtgccgctgccaatggtgctttgccaatggtgatctgccaatggtacgctgccaatgg

SEQ ID NO: 6707 - DNA, 136 bp, synthetic construct
  source 1..136: mol_type = other DNA
ccattggctacgctccattggctgccgctccattggctgctttccattggctgatctccattggctacgctccattggctgccgctccattggctgctttccattggctgatctccattggctacgctccattggc

SEQ ID NO: 6708 - DNA, 136 bp, synthetic construct
  source 1..136: mol_type = other DNA
gccaatcatacgctgccaatcatgccgctgccaatcatgctttgccaatcatgatctgccaatcatacgctgccaatcatgccgctgccaatcatgctttgccaatcatgatctgccaatcatacgctgccaatca

SEQ ID NO: 6709 - DNA, 136 bp, synthetic construct
  source 1..136: mol_type = other DNA
tgattggctacgcttgattggctgccgcttgattggctgcttttgattggctgatcttgattggctacgcttgattggctgccgcttgattggctgcttttgattggctgatcttgattggctacgcttgattggc

SEQ ID NO: 6710 - DNA, 136 bp, synthetic construct
  source 1..136: mol_type = other DNA
gccaatcgtacgctgccaatcgtgccgctgccaatcgtgctttgccaatcgtgatctgccaatcgtacgctgccaatcgtgccgctgccaatcgtgctttgccaatcgtgatctgccaatcgtacgctgccaatcg

SEQ ID NO: 6711 - DNA, 136 bp, synthetic construct
  source 1..136: mol_type = other DNA
cgattggctacgctcgattggctgccgctcgattggctgctttcgattggctgatctcgattggctacgctcgattggctgccgctcgattggctgctttcgattggctgatctcgattggctacgctcgattggc

SEQ ID NO: 6712 - DNA, 139 bp, synthetic construct
  source 1..139: mol_type = other DNA
cgctcgtcaccgcggctgtacgctcgctcgtcaccgcggctgtgccgctcgctcgtcaccgcggctgtgctttcgctcgtcaccgcggctgtgatctcgctcgtcaccgcggctgtacgctcgctcgtcaccgcggctg

SEQ ID NO: 6713 - DNA, 139 bp, synthetic construct
  source 1..139: mol_type = other DNA
cagccgcggtgacgagcgtacgctcagccgcggtgacgagcgtgccgctcagccgcggtgacgagcgtgctttcagccgcggtgacgagcgtgatctcagccgcggtgacgagcgtacgctcagccgcggtgacgagcg

SEQ ID NO: 6714 - DNA, 139 bp, synthetic construct
  source 1..139: mol_type = other DNA
cgctcgtcaccgcggctctacgctcgctcgtcaccgcggctctgccgctcgctcgtcaccgcggctctgctttcgctcgtcaccgcggctctgatctcgctcgtcaccgcggctctacgctcgctcgtcaccgcggctc

SEQ ID NO: 6715 - DNA, 139 bp, synthetic construct
  source 1..139: mol_type = other DNA
gagccgcggtgacgagcgtacgctgagccgcggtgacgagcgtgccgctgagccgcggtgacgagcgtgctttgagccgcggtgacgagcgtgatctgagccgcggtgacgagcgtacgctgagccgcggtgacgagcg

SEQ ID NO: 6716 - DNA, 139 bp, synthetic construct
  source 1..139: mol_type = other DNA
cgctcgttaccgcggctgtacgctcgctcgttaccgcggctgtgccgctcgctcgttaccgcggctgtgctttcgctcgttaccgcggctgtgatctcgctcgttaccgcggctgtacgctcgctcgttaccgcggctg

SEQ ID NO: 6717 - DNA, 139 bp, synthetic construct
  source 1..139: mol_type = other DNA
cagccgcggtaacgagcgtacgctcagccgcggtaacgagcgtgccgctcagccgcggtaacgagcgtgctttcagccgcggtaacgagcgtgatctcagccgcggtaacgagcgtacgctcagccgcggtaacgagcg

SEQ ID NO: 6718 - DNA, 139 bp, synthetic construct
  source 1..139: mol_type = other DNA
cgctcgttaccgcggctctacgctcgctcgttaccgcggctctgccgctcgctcgttaccgcggctctgctttcgctcgttaccgcggctctgatctcgctcgttaccgcggctctacgctcgctcgttaccgcggctc

SEQ ID NO: 6719 - DNA, 139 bp, synthetic construct
  source 1..139: mol_type = other DNA
gagccgcggtaacgagcgtacgctgagccgcggtaacgagcgtgccgctgagccgcggtaacgagcgtgctttgagccgcggtaacgagcgtgatctgagccgcggtaacgagcgtacgctgagccgcggtaacgagcg

SEQ ID NO: 6720 - DNA, 139 bp, synthetic construct
  source 1..139: mol_type = other DNA
cgctcctcaccgcggctgtacgctcgctcctcaccgcggctgtgccgctcgctcctcaccgcggctgtgctttcgctcctcaccgcggctgtgatctcgctcctcaccgcggctgtacgctcgctcctcaccgcggctg

SEQ ID NO: 6721 - DNA, 139 bp, synthetic construct
  source 1..139: mol_type = other DNA
cagccgcggtgaggagcgtacgctcagccgcggtgaggagcgtgccgctcagccgcggtgaggagcgtgctttcagccgcggtgaggagcgtgatctcagccgcggtgaggagcgtacgctcagccgcggtgaggagcg

SEQ ID NO: 6722 - DNA, 139 bp, synthetic construct
  source 1..139: mol_type = other DNA
cgctcctcaccgcggctctacgctcgctcctcaccgcggctctgccgctcgctcctcaccgcggctctgctttcgctcctcaccgcggctctgatctcgctcctcaccgcggctctacgctcgctcctcaccgcggctc

SEQ ID NO: 6723 - DNA, 139 bp, synthetic construct
  source 1..139: mol_type = other DNA
gagccgcggtgaggagcgtacgctgagccgcggtgaggagcgtgccgctgagccgcggtgaggagcgtgctttgagccgcggtgaggagcgtgatctgagccgcggtgaggagcgtacgctgagccgcggtgaggagcg

SEQ ID NO: 6724 - DNA, 139 bp, synthetic construct
  source 1..139: mol_type = other DNA
cgctccttaccgcggctgtacgctcgctccttaccgcggctgtgccgctcgctccttaccgcggctgtgctttcgctccttaccgcggctgtgatctcgctccttaccgcggctgtacgctcgctccttaccgcggctg

SEQ ID NO: 6725 - DNA, 139 bp, synthetic construct
  source 1..139: mol_type = other DNA
cagccgcggtaaggagcgtacgctcagccgcggtaaggagcgtgccgctcagccgcggtaaggagcgtgctttcagccgcggtaaggagcgtgatctcagccgcggtaaggagcgtacgctcagccgcggtaaggagcg

SEQ ID NO: 6726 - DNA, 139 bp, synthetic construct
  source 1..139: mol_type = other DNA
cgctccttaccgcggctctacgctcgctccttaccgcggctctgccgctcgctccttaccgcggctctgctttcgctccttaccgcggctctgatctcgctccttaccgcggctctacgctcgctccttaccgcggctc

SEQ ID NO: 6727 - DNA, 139 bp, synthetic construct
  source 1..139: mol_type = other DNA
gagccgcggtaaggagcgtacgctgagccgcggtaaggagcgtgccgctgagccgcggtaaggagcgtgctttgagccgcggtaaggagcgtgatctgagccgcggtaaggagcgtacgctgagccgcggtaaggagcg

SEQ ID NO: 6728 - DNA, 139 bp, synthetic construct
  source 1..139: mol_type = other DNA
cgcttgtcaccgcggctgtacgctcgcttgtcaccgcggctgtgccgctcgcttgtcaccgcggctgtgctttcgcttgtcaccgcggctgtgatctcgcttgtcaccgcggctgtacgctcgcttgtcaccgcggctg

SEQ ID NO: 6729 - DNA, 139 bp, synthetic construct
  source 1..139: mol_type = other DNA
cagccgcggtgacaagcgtacgctcagccgcggtgacaagcgtgccgctcagccgcggtgacaagcgtgctttcagccgcggtgacaagcgtgatctcagccgcggtgacaagcgtacgctcagccgcggtgacaagcg

SEQ ID NO: 6730 - DNA, 139 bp, synthetic construct
  source 1..139: mol_type = other DNA
cgcttgtcaccgcggctctacgctcgcttgtcaccgcggctctgccgctcgcttgtcaccgcggctctgctttcgcttgtcaccgcggctctgatctcgcttgtcaccgcggctctacgctcgcttgtcaccgcggctc

SEQ ID NO: 6731 - DNA, 139 bp, synthetic construct
  source 1..139: mol_type = other DNA
gagccgcggtgacaagcgtacgctgagccgcggtgacaagcgtgccgctgagccgcggtgacaagcgtgctttgagccgcggtgacaagcgtgatctgagccgcggtgacaagcgtacgctgagccgcggtgacaagcg

SEQ ID NO: 6732 - DNA, 139 bp, synthetic construct
  source 1..139: mol_type = other DNA
cgcttgttaccgcggctgtacgctcgcttgttaccgcggctgtgccgctcgcttgttaccgcggctgtgctttcgcttgttaccgcggctgtgatctcgcttgttaccgcggctgtacgctcgcttgttaccgcggctg

SEQ ID NO: 6733 - DNA, 139 bp, synthetic construct
  source 1..139: mol_type = other DNA
cagccgcggtaacaagcgtacgctcagccgcggtaacaagcgtgccgctcagccgcggtaacaagcgtgctttcagccgcggtaacaagcgtgatctcagccgcggtaacaagcgtacgctcagccgcggtaacaagcg

SEQ ID NO: 6734 - DNA, 139 bp, synthetic construct
  source 1..139: mol_type = other DNA
cgcttgttaccgcggctctacgctcgcttgttaccgcggctctgccgctcgcttgttaccgcggctctgctttcgcttgttaccgcggctctgatctcgcttgttaccgcggctctacgctcgcttgttaccgcggctc

SEQ ID NO: 6735 - DNA, 139 bp, synthetic construct
  source 1..139: mol_type = other DNA
gagccgcggtaacaagcgtacgctgagccgcggtaacaagcgtgccgctgagccgcggtaacaagcgtgctttgagccgcggtaacaagcgtgatctgagccgcggtaacaagcgtacgctgagccgcggtaacaagcg

SEQ ID NO: 6736 - DNA, 139 bp, synthetic construct
  source 1..139: mol_type = other DNA
cgcttctcaccgcggctgtacgctcgcttctcaccgcggctgtgccgctcgcttctcaccgcggctgtgctttcgcttctcaccgcggctgtgatctcgcttctcaccgcggctgtacgctcgcttctcaccgcggctg

SEQ ID NO: 6737 - DNA, 139 bp, synthetic construct
  source 1..139: mol_type = other DNA
cagccgcggtgagaagcgtacgctcagccgcggtgagaagcgtgccgctcagccgcggtgagaagcgtgctttcagccgcggtgagaagcgtgatctcagccgcggtgagaagcgtacgctcagccgcggtgagaagcg

SEQ ID NO: 6738 - DNA, 139 bp, synthetic construct
  source 1..139: mol_type = other DNA
cgcttctcaccgcggctctacgctcgcttctcaccgcggctctgccgctcgcttctcaccgcggctctgctttcgcttctcaccgcggctctgatctcgcttctcaccgcggctctacgctcgcttctcaccgcggctc

SEQ ID NO: 6739 - DNA, 139 bp, synthetic construct
  source 1..139: mol_type = other DNA
gagccgcggtgagaagcgtacgctgagccgcggtgagaagcgtgccgctgagccgcggtgagaagcgtgctttgagccgcggtgagaagcgtgatctgagccgcggtgagaagcgtacgctgagccgcggtgagaagcg

SEQ ID NO: 6740 - DNA, 139 bp, synthetic construct
  source 1..139: mol_type = other DNA
cgcttcttaccgcggctgtacgctcgcttcttaccgcggctgtgccgctcgcttcttaccgcggctgtgctttcgcttcttaccgcggctgtgatctcgcttcttaccgcggctgtacgctcgcttcttaccgcggctg

SEQ ID NO: 6741 - DNA, 139 bp, synthetic construct
  source 1..139: mol_type = other DNA
cagccgcggtaagaagcgtacgctcagccgcggtaagaagcgtgccgctcagccgcggtaagaagcgtgctttcagccgcggtaagaagcgtgatctcagccgcggtaagaagcgtacgctcagccgcggtaagaagcg

SEQ ID NO: 6742 - DNA, 139 bp, synthetic construct
  source 1..139: mol_type = other DNA
cgcttcttaccgcggctctacgctcgcttcttaccgcggctctgccgctcgcttcttaccgcggctctgctttcgcttcttaccgcggctctgatctcgcttcttaccgcggctctacgctcgcttcttaccgcggctc

SEQ ID NO: 6743 - DNA, 139 bp, synthetic construct
  source 1..139: mol_type = other DNA
gagccgcggtaagaagcgtacgctgagccgcggtaagaagcgtgccgctgagccgcggtaagaagcgtgctttgagccgcggtaagaagcgtgatctgagccgcggtaagaagcgtacgctgagccgcggtaagaagcg

SEQ ID NO: 6744 - DNA, 139 bp, synthetic construct
  source 1..139: mol_type = other DNA
cgttcgtcaccgcggctgtacgctcgttcgtcaccgcggctgtgccgctcgttcgtcaccgcggctgtgctttcgttcgtcaccgcggctgtgatctcgttcgtcaccgcggctgtacgctcgttcgtcaccgcggctg

SEQ ID NO: 6745 - DNA, 139 bp, synthetic construct
  source 1..139: mol_type = other DNA
cagccgcggtgacgaacgtacgctcagccgcggtgacgaacgtgccgctcagccgcggtgacgaacgtgctttcagccgcggtgacgaacgtgatctcagccgcggtgacgaacgtacgctcagccgcggtgacgaacg

SEQ ID NO: 6746 - DNA, 139 bp, synthetic construct
  source 1..139: mol_type = other DNA
cgttcgtcaccgcggctctacgctcgttcgtcaccgcggctctgccgctcgttcgtcaccgcggctctgctttcgttcgtcaccgcggctctgatctcgttcgtcaccgcggctctacgctcgttcgtcaccgcggctc

SEQ ID NO: 6747 - DNA, 139 bp, synthetic construct
  source 1..139: mol_type = other DNA
gagccgcggtgacgaacgtacgctgagccgcggtgacgaacgtgccgctgagccgcggtgacgaacgtgctttgagccgcggtgacgaacgtgatctgagccgcggtgacgaacgtacgctgagccgcggtgacgaacg

SEQ ID NO: 6748 - DNA, 139 bp, synthetic construct
  source 1..139: mol_type = other DNA
cgttcgttaccgcggctgtacgctcgttcgttaccgcggctgtgccgctcgttcgttaccgcggctgtgctttcgttcgttaccgcggctgtgatctcgttcgttaccgcggctgtacgctcgttcgttaccgcggctg

SEQ ID NO: 6749 - DNA, 139 bp, synthetic construct
  source 1..139: mol_type = other DNA
cagccgcggtaacgaacgtacgctcagccgcggtaacgaacgtgccgctcagccgcggtaacgaacgtgctttcagccgcggtaacgaacgtgatctcagccgcggtaacgaacgtacgctcagccgcggtaacgaacg

SEQ ID NO: 6750 - DNA, 139 bp, synthetic construct
  source 1..139: mol_type = other DNA
cgttcgttaccgcggctctacgctcgttcgttaccgcggctctgccgctcgttcgttaccgcggctctgctttcgttcgttaccgcggctctgatctcgttcgttaccgcggctctacgctcgttcgttaccgcggctc

SEQ ID NO: 6751 - DNA, 139 bp, synthetic construct
  source 1..139: mol_type = other DNA
gagccgcggtaacgaacgtacgctgagccgcggtaacgaacgtgccgctgagccgcggtaacgaacgtgctttgagccgcggtaacgaacgtgatctgagccgcggtaacgaacgtacgctgagccgcggtaacgaacg

SEQ ID NO: 6752 - DNA, 139 bp, synthetic construct
  source 1..139: mol_type = other DNA
cgttcctcaccgcggctgtacgctcgttcctcaccgcggctgtgccgctcgttcctcaccgcggctgtgctttcgttcctcaccgcggctgtgatctcgttcctcaccgcggctgtacgctcgttcctcaccgcggctg

SEQ ID NO: 6753 - DNA, 139 bp, synthetic construct
  source 1..139: mol_type = other DNA
cagccgcggtgaggaacgtacgctcagccgcggtgaggaacgtgccgctcagccgcggtgaggaacgtgctttcagccgcggtgaggaacgtgatctcagccgcggtgaggaacgtacgctcagccgcggtgaggaacg

SEQ ID NO: 6754 - DNA, 139 bp, synthetic construct
  source 1..139: mol_type = other DNA
cgttcctcaccgcggctctacgctcgttcctcaccgcggctctgccgctcgttcctcaccgcggctctgctttcgttcctcaccgcggctctgatctcgttcctcaccgcggctctacgctcgttcctcaccgcggctc

SEQ ID NO: 6755 - DNA, 139 bp, synthetic construct
  source 1..139: mol_type = other DNA
gagccgcggtgaggaacgtacgctgagccgcggtgaggaacgtgccgctgagccgcggtgaggaacgtgctttgagccgcggtgaggaacgtgatctgagccgcggtgaggaacgtacgctgagccgcggtgaggaacg

SEQ ID NO: 6756 - DNA, 139 bp, synthetic construct
  source 1..139: mol_type = other DNA
cgttccttaccgcggctgtacgctcgttccttaccgcggctgtgccgctcgttccttaccgcggctgtgctttcgttccttaccgcggctgtgatctcgttccttaccgcggctgtacgctcgttccttaccgcggctg

SEQ ID NO: 6757 - DNA, 139 bp, synthetic construct
  source 1..139: mol_type = other DNA
cagccgcggtaaggaacgtacgctcagccgcggtaaggaacgtgccgctcagccgcggtaaggaacgtgctttcagccgcggtaaggaacgtgatctcagccgcggtaaggaacgtacgctcagccgcggtaaggaacg

SEQ ID NO: 6758 - DNA, 139 bp, synthetic construct
  source 1..139: mol_type = other DNA
cgttccttaccgcggctctacgctcgttccttaccgcggctctgccgctcgttccttaccgcggctctgctttcgttccttaccgcggctctgatctcgttccttaccgcggctctacgctcgttccttaccgcggctc

SEQ ID NO: 6759 - DNA, 139 bp, synthetic construct
  source 1..139: mol_type = other DNA
gagccgcggtaaggaacgtacgctgagccgcggtaaggaacgtgccgctgagccgcggtaaggaacgtgctttgagccgcggtaaggaacgtgatctgagccgcggtaaggaacgtacgctgagccgcggtaaggaacg

SEQ ID NO: 6760 - DNA, 139 bp, synthetic construct
  source 1..139: mol_type = other DNA
cgtttgtcaccgcggctgtacgctcgtttgtcaccgcggctgtgccgctcgtttgtcaccgcggctgtgctttcgtttgtcaccgcggctgtgatctcgtttgtcaccgcggctgtacgctcgtttgtcaccgcggctg

SEQ ID NO: 6761 - DNA, 139 bp, synthetic construct
  source 1..139: mol_type = other DNA
cagccgcggtgacaaacgtacgctcagccgcggtgacaaacgtgccgctcagccgcggtgacaaacgtgctttcagccgcggtgacaaacgtgatctcagccgcggtgacaaacgtacgctcagccgcggtgacaaacg

SEQ ID NO: 6762 - DNA, 139 bp, synthetic construct
  source 1..139: mol_type = other DNA
cgtttgtcaccgcggctctacgctcgtttgtcaccgcggctctgccgctcgtttgtcaccgcggctctgctttcgtttgtcaccgcggctctgatctcgtttgtcaccgcggctctacgctcgtttgtcaccgcggctc

SEQ ID NO: 6763 - DNA, 139 bp, synthetic construct
  source 1..139: mol_type = other DNA
gagccgcggtgacaaacgtacgctgagccgcggtgacaaacgtgccgctgagccgcggtgacaaacgtgctttgagccgcggtgacaaacgtgatctgagccgcggtgacaaacgtacgctgagccgcggtgacaaacg

SEQ ID NO: 6764 - DNA, 139 bp, synthetic construct
  source 1..139: mol_type = other DNA
cgtttgttaccgcggctgtacgctcgtttgttaccgcggctgtgccgctcgtttgttaccgcggctgtgctttcgtttgttaccgcggctgtgatctcgtttgttaccgcggctgtacgctcgtttgttaccgcggctg

SEQ ID NO: 6765 - DNA, 139 bp, synthetic construct
  source 1..139: mol_type = other DNA
cagccgcggtaacaaacgtacgctcagccgcggtaacaaacgtgccgctcagccgcggtaacaaacgtgctttcagccgcggtaacaaacgtgatctcagccgcggtaacaaacgtacgctcagccgcggtaacaaacg

SEQ ID NO: 6766 - DNA, 139 bp, synthetic construct
  source 1..139: mol_type = other DNA
cgtttgttaccgcggctctacgctcgtttgttaccgcggctctgccgctcgtttgttaccgcggctctgctttcgtttgttaccgcggctctgatctcgtttgttaccgcggctctacgctcgtttgttaccgcggctc

SEQ ID NO: 6767 - DNA, 139 bp, synthetic construct
  source 1..139: mol_type = other DNA
gagccgcggtaacaaacgtacgctgagccgcggtaacaaacgtgccgctgagccgcggtaacaaacgtgctttgagccgcggtaacaaacgtgatctgagccgcggtaacaaacgtacgctgagccgcggtaacaaacg

SEQ ID NO: 6768 - DNA, 139 bp, synthetic construct
  source 1..139: mol_type = other DNA
cgtttctcaccgcggctgtacgctcgtttctcaccgcggctgtgccgctcgtttctcaccgcggctgtgctttcgtttctcaccgcggctgtgatctcgtttctcaccgcggctgtacgctcgtttctcaccgcggctg

SEQ ID NO: 6769 - DNA, 139 bp, synthetic construct
  source 1..139: mol_type = other DNA
cagccgcggtgagaaacgtacgctcagccgcggtgagaaacgtgccgctcagccgcggtgagaaacgtgctttcagccgcggtgagaaacgtgatctcagccgcggtgagaaacgtacgctcagccgcggtgagaaacg

SEQ ID NO: 6770 - DNA, 139 bp, synthetic construct
  source 1..139: mol_type = other DNA
cgtttctcaccgcggctctacgctcgtttctcaccgcggctctgccgctcgtttctcaccgcggctctgctttcgtttctcaccgcggctctgatctcgtttctcaccgcggctctacgctcgtttctcaccgcggctc

SEQ ID NO: 6771 - DNA, 139 bp, synthetic construct
  source 1..139: mol_type = other DNA
gagccgcggtgagaaacgtacgctgagccgcggtgagaaacgtgccgctgagccgcggtgagaaacgtgctttgagccgcggtgagaaacgtgatctgagccgcggtgagaaacgtacgctgagccgcggtgagaaacg

SEQ ID NO: 6772 - DNA, 139 bp, synthetic construct
  source 1..139: mol_type = other DNA
cgtttcttaccgcggctgtacgctcgtttcttaccgcggctgtgccgctcgtttcttaccgcggctgtgctttcgtttcttaccgcggctgtgatctcgtttcttaccgcggctgtacgctcgtttcttaccgcggctg

SEQ ID NO: 6773 - DNA, 139 bp, synthetic construct
  source 1..139: mol_type = other DNA
cagccgcggtaagaaacgtacgctcagccgcggtaagaaacgtgccgctcagccgcggtaagaaacgtgctttcagccgcggtaagaaacgtgatctcagccgcggtaagaaacgtacgctcagccgcggtaagaaacg

SEQ ID NO: 6774 - DNA, 139 bp, synthetic construct
  source 1..139: mol_type = other DNA
cgtttcttaccgcggctctacgctcgtttcttaccgcggctctgccgctcgtttcttaccgcggctctgctttcgtttcttaccgcggctctgatctcgtttcttaccgcggctctacgctcgtttcttaccgcggctc

SEQ ID NO: 6775 - DNA, 139 bp, synthetic construct
  source 1..139: mol_type = other DNA
gagccgcggtaagaaacgtacgctgagccgcggtaagaaacgtgccgctgagccgcggtaagaaacgtgctttgagccgcggtaagaaacgtgatctgagccgcggtaagaaacgtacgctgagccgcggtaagaaacg

SEQ ID NO: 6776 - DNA, 139 bp, synthetic construct
  source 1..139: mol_type = other DNA
tgctcgtcaccgcggctgtacgcttgctcgtcaccgcggctgtgccgcttgctcgtcaccgcggctgtgcttttgctcgtcaccgcggctgtgatcttgctcgtcaccgcggctgtacgcttgctcgtcaccgcggctg

SEQ ID NO: 6777 - DNA, 139 bp, synthetic construct
  source 1..139: mol_type = other DNA
cagccgcggtgacgagcatacgctcagccgcggtgacgagcatgccgctcagccgcggtgacgagcatgctttcagccgcggtgacgagcatgatctcagccgcggtgacgagcatacgctcagccgcggtgacgagca

SEQ ID NO: 6778 - DNA, 139 bp, synthetic construct
  source 1..139: mol_type = other DNA
tgctcgtcaccgcggctctacgcttgctcgtcaccgcggctctgccgcttgctcgtcaccgcggctctgcttttgctcgtcaccgcggctctgatcttgctcgtcaccgcggctctacgcttgctcgtcaccgcggctc

SEQ ID NO: 6779 - DNA, 139 bp, synthetic construct
  source 1..139: mol_type = other DNA
gagccgcggtgacgagcatacgctgagccgcggtgacgagcatgccgctgagccgcggtgacgagcatgctttgagccgcggtgacgagcatgatctgagccgcggtgacgagcatacgctgagccgcggtgacgagca

SEQ ID NO: 6780 - DNA, 139 bp, synthetic construct
  source 1..139: mol_type = other DNA
tgctcgttaccgcggctgtacgcttgctcgttaccgcggctgtgccgcttgctcgttaccgcggctgtgcttttgctcgttaccgcggctgtgatcttgctcgttaccgcggctgtacgcttgctcgttaccgcggctg

SEQ ID NO: 6781 - DNA, 139 bp, synthetic construct
  source 1..139: mol_type = other DNA
cagccgcggtaacgagcatacgctcagccgcggtaacgagcatgccgctcagccgcggtaacgagcatgctttcagccgcggtaacgagcatgatctcagccgcggtaacgagcatacgctcagccgcggtaacgagca

SEQ ID NO: 6782 - DNA, 139 bp, synthetic construct
  source 1..139: mol_type = other DNA
tgctcgttaccgcggctctacgcttgctcgttaccgcggctctgccgcttgctcgttaccgcggctctgcttttgctcgttaccgcggctctgatcttgctcgttaccgcggctctacgcttgctcgttaccgcggctc

SEQ ID NO: 6783 - DNA, 139 bp, synthetic construct
  source 1..139: mol_type = other DNA
gagccgcggtaacgagcatacgctgagccgcggtaacgagcatgccgctgagccgcggtaacgagcatgctttgagccgcggtaacgagcatgatctgagccgcggtaacgagcatacgctgagccgcggtaacgagca

SEQ ID NO: 6784 - DNA, 139 bp, synthetic construct
  source 1..139: mol_type = other DNA
tgctcctcaccgcggctgtacgcttgctcctcaccgcggctgtgccgcttgctcctcaccgcggctgtgcttttgctcctcaccgcggctgtgatcttgctcctcaccgcggctgtacgcttgctcctcaccgcggctg

SEQ ID NO: 6785 - DNA, 139 bp, synthetic construct
  source 1..139: mol_type = other DNA
cagccgcggtgaggagcatacgctcagccgcggtgaggagcatgccgctcagccgcggtgaggagcatgctttcagccgcggtgaggagcatgatctcagccgcggtgaggagcatacgctcagccgcggtgaggagca

SEQ ID NO: 6786 - DNA, 139 bp, synthetic construct
  source 1..139: mol_type = other DNA
tgctcctcaccgcggctctacgcttgctcctcaccgcggctctgccgcttgctcctcaccgcggctctgcttttgctcctcaccgcggctctgatcttgctcctcaccgcggctctacgcttgctcctcaccgcggctc

SEQ ID NO: 6787 - DNA, 139 bp, synthetic construct
  source 1..139: mol_type = other DNA
gagccgcggtgaggagcatacgctgagccgcggtgaggagcatgccgctgagccgcggtgaggagcatgctttgagccgcggtgaggagcatgatctgagccgcggtgaggagcatacgctgagccgcggtgaggagca

SEQ ID NO: 6788 - DNA, 139 bp, synthetic construct
  source 1..139: mol_type = other DNA
tgctccttaccgcggctgtacgcttgctccttaccgcggctgtgccgcttgctccttaccgcggctgtgcttttgctccttaccgcggctgtgatcttgctccttaccgcggctgtacgcttgctccttaccgcggctg

SEQ ID NO: 6789 - DNA, 139 bp, synthetic construct
  source 1..139: mol_type = other DNA
cagccgcggtaaggagcatacgctcagccgcggtaaggagcatgccgctcagccgcggtaaggagcatgctttcagccgcggtaaggagcatgatctcagccgcggtaaggagcatacgctcagccgcggtaaggagca

SEQ ID NO: 6790 - DNA, 139 bp, synthetic construct
  source 1..139: mol_type = other DNA
tgctccttaccgcggctctacgcttgctccttaccgcggctctgccgcttgctccttaccgcggctctgcttttgctccttaccgcggctctgatcttgctccttaccgcggctctacgcttgctccttaccgcggctc

SEQ ID NO: 6791 - DNA, 139 bp, synthetic construct
  source 1..139: mol_type = other DNA
gagccgcggtaaggagcatacgctgagccgcggtaaggagcatgccgctgagccgcggtaaggagcatgctttgagccgcggtaaggagcatgatctgagccgcggtaaggagcatacgctgagccgcggtaaggagca

SEQ ID NO: 6792 - DNA, 139 bp, synthetic construct
  source 1..139: mol_type = other DNA
tgcttgtcaccgcggctgtacgcttgcttgtcaccgcggctgtgccgcttgcttgtcaccgcggctgtgcttttgcttgtcaccgcggctgtgatcttgcttgtcaccgcggctgtacgcttgcttgtcaccgcggctg

SEQ ID NO: 6793 - DNA, 139 bp, synthetic construct
  source 1..139: mol_type = other DNA
cagccgcggtgacaagcatacgctcagccgcggtgacaagcatgccgctcagccgcggtgacaagcatgctttcagccgcggtgacaagcatgatctcagccgcggtgacaagcatacgctcagccgcggtgacaagca

SEQ ID NO: 6794 - DNA, 139 bp, synthetic construct
  source 1..139: mol_type = other DNA
tgcttgtcaccgcggctctacgcttgcttgtcaccgcggctctgccgcttgcttgtcaccgcggctctgcttttgcttgtcaccgcggctctgatcttgcttgtcaccgcggctctacgcttgcttgtcaccgcggctc

SEQ ID NO: 6795 - DNA, 139 bp, synthetic construct
  source 1..139: mol_type = other DNA
gagccgcggtgacaagcatacgctgagccgcggtgacaagcatgccgctgagccgcggtgacaagcatgctttgagccgcggtgacaagcatgatctgagccgcggtgacaagcatacgctgagccgcggtgacaagca

SEQ ID NO: 6796 - DNA, 139 bp, synthetic construct
  source 1..139: mol_type = other DNA
tgcttgttaccgcggctgtacgcttgcttgttaccgcggctgtgccgcttgcttgttaccgcggctgtgcttttgcttgttaccgcggctgtgatcttgcttgttaccgcggctgtacgcttgcttgttaccgcggctg

SEQ ID NO: 6797 - DNA, 139 bp, synthetic construct
  source 1..139: mol_type = other DNA
cagccgcggtaacaagcatacgctcagccgcggtaacaagcatgccgctcagccgcggtaacaagcatgctttcagccgcggtaacaagcatgatctcagccgcggtaacaagcatacgctcagccgcggtaacaagca

SEQ ID NO: 6798 - DNA, 139 bp, synthetic construct
  source 1..139: mol_type = other DNA
tgcttgttaccgcggctctacgcttgcttgttaccgcggctctgccgcttgcttgttaccgcggctctgcttttgcttgttaccgcggctctgatcttgcttgttaccgcggctctacgcttgcttgttaccgcggctc

SEQ ID NO: 6799 - DNA, 139 bp, synthetic construct
  source 1..139: mol_type = other DNA
gagccgcggtaacaagcatacgctgagccgcggtaacaagcatgccgctgagccgcggtaacaagcatgctttgagccgcggtaacaagcatgatctgagccgcggtaacaagcatacgctgagccgcggtaacaagca

SEQ ID NO: 6800 - DNA, 139 bp, synthetic construct
  source 1..139: mol_type = other DNA
tgcttctcaccgcggctgtacgcttgcttctcaccgcggctgtgccgcttgcttctcaccgcggctgtgcttttgcttctcaccgcggctgtgatcttgcttctcaccgcggctgtacgcttgcttctcaccgcggctg

SEQ ID NO: 6801 - DNA, 139 bp, synthetic construct
  source 1..139: mol_type = other DNA
cagccgcggtgagaagcatacgctcagccgcggtgagaagcatgccgctcagccgcggtgagaagcatgctttcagccgcggtgagaagcatgatctcagccgcggtgagaagcatacgctcagccgcggtgagaagca

SEQ ID NO: 6802 - DNA, 139 bp, synthetic construct
  source 1..139: mol_type = other DNA
tgcttctcaccgcggctctacgcttgcttctcaccgcggctctgccgcttgcttctcaccgcggctctgcttttgcttctcaccgcggctctgatcttgcttctcaccgcggctctacgcttgcttctcaccgcggctc

SEQ ID NO: 6803 - DNA, 139 bp, synthetic construct
  source 1..139: mol_type = other DNA
gagccgcggtgagaagcatacgctgagccgcggtgagaagcatgccgctgagccgcggtgagaagcatgctttgagccgcggtgagaagcatgatctgagccgcggtgagaagcatacgctgagccgcggtgagaagca

SEQ ID NO: 6804 - DNA, 139 bp, synthetic construct
  source 1..139: mol_type = other DNA
tgcttcttaccgcggctgtacgcttgcttcttaccgcggctgtgccgcttgcttcttaccgcggctgtgcttttgcttcttaccgcggctgtgatcttgcttcttaccgcggctgtacgcttgcttcttaccgcggctg

SEQ ID NO: 6805 - DNA, 139 bp, synthetic construct
  source 1..139: mol_type = other DNA
cagccgcggtaagaagcatacgctcagccgcggtaagaagcatgccgctcagccgcggtaagaagcatgctttcagccgcggtaagaagcatgatctcagccgcggtaagaagcatacgctcagccgcggtaagaagca

SEQ ID NO: 6806 - DNA, 139 bp, synthetic construct
  source 1..139: mol_type = other DNA
tgcttcttaccgcggctctacgcttgcttcttaccgcggctctgccgcttgcttcttaccgcggctctgcttttgcttcttaccgcggctctgatcttgcttcttaccgcggctctacgcttgcttcttaccgcggctc

SEQ ID NO: 6807 - DNA, 139 bp, synthetic construct
  source 1..139: mol_type = other DNA
gagccgcggtaagaagcatacgctgagccgcggtaagaagcatgccgctgagccgcggtaagaagcatgctttgagccgcggtaagaagcatgatctgagccgcggtaagaagcatacgctgagccgcggtaagaagca

SEQ ID NO: 6808 - DNA, 139 bp, synthetic construct
  source 1..139: mol_type = other DNA
tgttcgtcaccgcggctgtacgcttgttcgtcaccgcggctgtgccgcttgttcgtcaccgcggctgtgcttttgttcgtcaccgcggctgtgatcttgttcgtcaccgcggctgtacgcttgttcgtcaccgcggctg

SEQ ID NO: 6809 - DNA, 139 bp, synthetic construct
  source 1..139: mol_type = other DNA
cagccgcggtgacgaacatacgctcagccgcggtgacgaacatgccgctcagccgcggtgacgaacatgctttcagccgcggtgacgaacatgatctcagccgcggtgacgaacatacgctcagccgcggtgacgaaca

SEQ ID NO: 6810 - DNA, 139 bp, synthetic construct
  source 1..139: mol_type = other DNA
tgttcgtcaccgcggctctacgcttgttcgtcaccgcggctctgccgcttgttcgtcaccgcggctctgcttttgttcgtcaccgcggctctgatcttgttcgtcaccgcggctctacgcttgttcgtcaccgcggctc

SEQ ID NO: 6811 - DNA, 139 bp, synthetic construct
  source 1..139: mol_type = other DNA
gagccgcggtgacgaacatacgctgagccgcggtgacgaacatgccgctgagccgcggtgacgaacatgctttgagccgcggtgacgaacatgatctgagccgcggtgacgaacatacgctgagccgcggtgacgaaca

SEQ ID NO: 6812 - DNA, 139 bp, synthetic construct
  source 1..139: mol_type = other DNA
tgttcgttaccgcggctgtacgcttgttcgttaccgcggctgtgccgcttgttcgttaccgcggctgtgcttttgttcgttaccgcggctgtgatcttgttcgttaccgcggctgtacgcttgttcgttaccgcggctg

SEQ ID NO: 6813 - DNA, 139 bp, synthetic construct
  source 1..139: mol_type = other DNA
cagccgcggtaacgaacatacgctcagccgcggtaacgaacatgccgctcagccgcggtaacgaacatgctttcagccgcggtaacgaacatgatctcagccgcggtaacgaacatacgctcagccgcggtaacgaaca

SEQ ID NO: 6814 - DNA, 139 bp, synthetic construct
  source 1..139: mol_type = other DNA
tgttcgttaccgcggctctacgcttgttcgttaccgcggctctgccgcttgttcgttaccgcggctctgcttttgttcgttaccgcggctctgatcttgttcgttaccgcggctctacgcttgttcgttaccgcggctc

SEQ ID NO: 6815 - DNA, 139 bp, synthetic construct
  source 1..139: mol_type = other DNA
gagccgcggtaacgaacatacgctgagccgcggtaacgaacatgccgctgagccgcggtaacgaacatgctttgagccgcggtaacgaacatgatctgagccgcggtaacgaacatacgctgagccgcggtaacgaaca

SEQ ID NO: 6816 - DNA, 139 bp, synthetic construct
  source 1..139: mol_type = other DNA
tgttcctcaccgcggctgtacgcttgttcctcaccgcggctgtgccgcttgttcctcaccgcggctgtgcttttgttcctcaccgcggctgtgatcttgttcctcaccgcggctgtacgcttgttcctcaccgcggctg

SEQ ID NO: 6817 - DNA, 139 bp, synthetic construct
  source 1..139: mol_type = other DNA
cagccgcggtgaggaacatacgctcagccgcggtgaggaacatgccgctcagccgcggtgaggaacatgctttcagccgcggtgaggaacatgatctcagccgcggtgaggaacatacgctcagccgcggtgaggaaca

SEQ ID NO: 6818 - DNA, 139 bp, synthetic construct
  source 1..139: mol_type = other DNA
tgttcctcaccgcggctctacgcttgttcctcaccgcggctctgccgcttgttcctcaccgcggctctgcttttgttcctcaccgcggctctgatcttgttcctcaccgcggctctacgcttgttcctcaccgcggctc

SEQ ID NO: 6819 - DNA, 139 bp, synthetic construct
  source 1..139: mol_type = other DNA
gagccgcggtgaggaacatacgctgagccgcggtgaggaacatgccgctgagccgcggtgaggaacatgctttgagccgcggtgaggaacatgatctgagccgcggtgaggaacatacgctgagccgcggtgaggaaca

SEQ ID NO: 6820 - DNA, 139 bp, synthetic construct
  source 1..139: mol_type = other DNA
tgttccttaccgcggctgtacgcttgttccttaccgcggctgtgccgcttgttccttaccgcggctgtgcttttgttccttaccgcggctgtgatcttgttccttaccgcggctgtacgcttgttccttaccgcggctg

SEQ ID NO: 6821 - DNA, 139 bp, synthetic construct
  source 1..139: mol_type = other DNA
cagccgcggtaaggaacatacgctcagccgcggtaaggaacatgccgctcagccgcggtaaggaacatgctttcagccgcggtaaggaacatgatctcagccgcggtaaggaacatacgctcagccgcggtaaggaaca

SEQ ID NO: 6822 - DNA, 139 bp, synthetic construct
  source 1..139: mol_type = other DNA
tgttccttaccgcggctctacgcttgttccttaccgcggctctgccgcttgttccttaccgcggctctgcttttgttccttaccgcggctctgatcttgttccttaccgcggctctacgcttgttccttaccgcggctc

SEQ ID NO: 6823 - DNA, 139 bp, synthetic construct
  source 1..139: mol_type = other DNA
gagccgcggtaaggaacatacgctgagccgcggtaaggaacatgccgctgagccgcggtaaggaacatgctttgagccgcggtaaggaacatgatctgagccgcggtaaggaacatacgctgagccgcggtaaggaaca

SEQ ID NO: 6824 - DNA, 139 bp, synthetic construct
  source 1..139: mol_type = other DNA
tgtttgtcaccgcggctgtacgcttgtttgtcaccgcggctgtgccgcttgtttgtcaccgcggctgtgcttttgtttgtcaccgcggctgtgatcttgtttgtcaccgcggctgtacgcttgtttgtcaccgcggctg

SEQ ID NO: 6825 - DNA, 139 bp, synthetic construct
  source 1..139: mol_type = other DNA
cagccgcggtgacaaacatacgctcagccgcggtgacaaacatgccgctcagccgcggtgacaaacatgctttcagccgcggtgacaaacatgatctcagccgcggtgacaaacatacgctcagccgcggtgacaaaca

SEQ ID NO: 6826 - DNA, 139 bp, synthetic construct
  source 1..139: mol_type = other DNA
tgtttgtcaccgcggctctacgcttgtttgtcaccgcggctctgccgcttgtttgtcaccgcggctctgcttttgtttgtcaccgcggctctgatcttgtttgtcaccgcggctctacgcttgtttgtcaccgcggctc

SEQ ID NO: 6827 - DNA, 139 bp, synthetic construct
  source 1..139: mol_type = other DNA
gagccgcggtgacaaacatacgctgagccgcggtgacaaacatgccgctgagccgcggtgacaaacatgctttgagccgcggtgacaaacatgatctgagccgcggtgacaaacatacgctgagccgcggtgacaaaca

SEQ ID NO: 6828 - DNA, 139 bp, synthetic construct
  source 1..139: mol_type = other DNA
tgtttgttaccgcggctgtacgcttgtttgttaccgcggctgtgccgcttgtttgttaccgcggctgtgcttttgtttgttaccgcggctgtgatcttgtttgttaccgcggctgtacgcttgtttgttaccgcggctg

SEQ ID NO: 6829 - DNA, 139 bp, synthetic construct
  source 1..139: mol_type = other DNA
cagccgcggtaacaaacatacgctcagccgcggtaacaaacatgccgctcagccgcggtaacaaacatgctttcagccgcggtaacaaacatgatctcagccgcggtaacaaacatacgctcagccgcggtaacaaaca

SEQ ID NO: 6830 - DNA, 139 bp, synthetic construct
  source 1..139: mol_type = other DNA
tgtttgttaccgcggctctacgcttgtttgttaccgcggctctgccgcttgtttgttaccgcggctctgcttttgtttgttaccgcggctctgatcttgtttgttaccgcggctctacgcttgtttgttaccgcggctc

SEQ ID NO: 6831 - DNA, 139 bp, synthetic construct
  source 1..139: mol_type = other DNA
gagccgcggtaacaaacatacgctgagccgcggtaacaaacatgccgctgagccgcggtaacaaacatgctttgagccgcggtaacaaacatgatctgagccgcggtaacaaacatacgctgagccgcggtaacaaaca

SEQ ID NO: 6832 - DNA, 139 bp, synthetic construct
  source 1..139: mol_type = other DNA
tgtttctcaccgcggctgtacgcttgtttctcaccgcggctgtgccgcttgtttctcaccgcggctgtgcttttgtttctcaccgcggctgtgatcttgtttctcaccgcggctgtacgcttgtttctcaccgcggctg

SEQ ID NO: 6833 - DNA, 139 bp, synthetic construct
  source 1..139: mol_type = other DNA
cagccgcggtgagaaacatacgctcagccgcggtgagaaacatgccgctcagccgcggtgagaaacatgctttcagccgcggtgagaaacatgatctcagccgcggtgagaaacatacgctcagccgcggtgagaaaca

SEQ ID NO: 6834 - DNA, 139 bp, synthetic construct
  source 1..139: mol_type = other DNA
tgtttctcaccgcggctctacgcttgtttctcaccgcggctctgccgcttgtttctcaccgcggctctgcttttgtttctcaccgcggctctgatcttgtttctcaccgcggctctacgcttgtttctcaccgcggctc

SEQ ID NO: 6835 - DNA, 139 bp, synthetic construct
  source 1..139: mol_type = other DNA
gagccgcggtgagaaacatacgctgagccgcggtgagaaacatgccgctgagccgcggtgagaaacatgctttgagccgcggtgagaaacatgatctgagccgcggtgagaaacatacgctgagccgcggtgagaaaca

SEQ ID NO: 6836 - DNA, 139 bp, synthetic construct
  source 1..139: mol_type = other DNA
tgtttcttaccgcggctgtacgcttgtttcttaccgcggctgtgccgcttgtttcttaccgcggctgtgcttttgtttcttaccgcggctgtgatcttgtttcttaccgcggctgtacgcttgtttcttaccgcggctg

SEQ ID NO: 6837 - DNA, 139 bp, synthetic construct
  source 1..139: mol_type = other DNA
cagccgcggtaagaaacatacgctcagccgcggtaagaaacatgccgctcagccgcggtaagaaacatgctttcagccgcggtaagaaacatgatctcagccgcggtaagaaacatacgctcagccgcggtaagaaaca

SEQ ID NO: 6838 - DNA, 139 bp, synthetic construct
  source 1..139: mol_type = other DNA
tgtttcttaccgcggctctacgcttgtttcttaccgcggctctgccgcttgtttcttaccgcggctctgcttttgtttcttaccgcggctctgatcttgtttcttaccgcggctctacgcttgtttcttaccgcggctc

SEQ ID NO: 6839 - DNA, 139 bp, synthetic construct
  source 1..139: mol_type = other DNA
gagccgcggtaagaaacatacgctgagccgcggtaagaaacatgccgctgagccgcggtaagaaacatgctttgagccgcggtaagaaacatgatctgagccgcggtaagaaacatacgctgagccgcggtaagaaaca

SEQ ID NO: 6840 - DNA, 139 bp, synthetic construct
  source 1..139: mol_type = other DNA
aagggcggggcctgctttaagggcggggcctgatctaagggcggggcctacgctaagggcggggcctgccgctaagggcggggcctgctttaagggcggggcctgatctaagggcggggcctacgctaagggcggggcc

SEQ ID NO: 6841 - DNA, 139 bp, synthetic construct
  source 1..139: mol_type = other DNA
ggccccgccctttgctttggccccgccctttgatctggccccgccctttacgctggccccgccctttgccgctggccccgccctttgctttggccccgccctttgatctggccccgccctttacgctggccccgccctt

SEQ ID NO: 6842 - DNA, 139 bp, synthetic construct
  source 1..139: mol_type = other DNA
aagggcggggcttgctttaagggcggggcttgatctaagggcggggcttacgctaagggcggggcttgccgctaagggcggggcttgctttaagggcggggcttgatctaagggcggggcttacgctaagggcggggct

SEQ ID NO: 6843 - DNA, 139 bp, synthetic construct
  source 1..139: mol_type = other DNA
agccccgccctttgctttagccccgccctttgatctagccccgccctttacgctagccccgccctttgccgctagccccgccctttgctttagccccgccctttgatctagccccgccctttacgctagccccgccctt

SEQ ID NO: 6844 - DNA, 139 bp, synthetic construct
  source 1..139: mol_type = other DNA
aagggtggggcctgctttaagggtggggcctgatctaagggtggggcctacgctaagggtggggcctgccgctaagggtggggcctgctttaagggtggggcctgatctaagggtggggcctacgctaagggtggggcc

SEQ ID NO: 6845 - DNA, 139 bp, synthetic construct
  source 1..139: mol_type = other DNA
ggccccaccctttgctttggccccaccctttgatctggccccaccctttacgctggccccaccctttgccgctggccccaccctttgctttggccccaccctttgatctggccccaccctttacgctggccccaccctt

SEQ ID NO: 6846 - DNA, 139 bp, synthetic construct
  source 1..139: mol_type = other DNA
aagggtggggcttgctttaagggtggggcttgatctaagggtggggcttacgctaagggtggggcttgccgctaagggtggggcttgctttaagggtggggcttgatctaagggtggggcttacgctaagggtggggct

SEQ ID NO: 6847 - DNA, 139 bp, synthetic construct
  source 1..139: mol_type = other DNA
agccccaccctttgctttagccccaccctttgatctagccccaccctttacgctagccccaccctttgccgctagccccaccctttgctttagccccaccctttgatctagccccaccctttacgctagccccaccctt

SEQ ID NO: 6848 - DNA, 139 bp, synthetic construct
  source 1..139: mol_type = other DNA
aggggcggggcctgctttaggggcggggcctgatctaggggcggggcctacgctaggggcggggcctgccgctaggggcggggcctgctttaggggcggggcctgatctaggggcggggcctacgctaggggcggggcc

SEQ ID NO: 6849 - DNA, 139 bp, synthetic construct
  source 1..139: mol_type = other DNA
ggccccgccccttgctttggccccgccccttgatctggccccgccccttacgctggccccgccccttgccgctggccccgccccttgctttggccccgccccttgatctggccccgccccttacgctggccccgcccct

SEQ ID NO: 6850 - DNA, 139 bp, synthetic construct
  source 1..139: mol_type = other DNA
aggggcggggcttgctttaggggcggggcttgatctaggggcggggcttacgctaggggcggggcttgccgctaggggcggggcttgctttaggggcggggcttgatctaggggcggggcttacgctaggggcggggct

SEQ ID NO: 6851 - DNA, 139 bp, synthetic construct
  source 1..139: mol_type = other DNA
agccccgccccttgctttagccccgccccttgatctagccccgccccttacgctagccccgccccttgccgctagccccgccccttgctttagccccgccccttgatctagccccgccccttacgctagccccgcccct

SEQ ID NO: 6852 - DNA, 139 bp, synthetic construct
  source 1..139: mol_type = other DNA
aggggtggggcctgctttaggggtggggcctgatctaggggtggggcctacgctaggggtggggcctgccgctaggggtggggcctgctttaggggtggggcctgatctaggggtggggcctacgctaggggtggggcc

SEQ ID NO: 6853 - DNA, 139 bp, synthetic construct
  source 1..139: mol_type = other DNA
ggccccaccccttgctttggccccaccccttgatctggccccaccccttacgctggccccaccccttgccgctggccccaccccttgctttggccccaccccttgatctggccccaccccttacgctggccccacccct

SEQ ID NO: 6854 - DNA, 139 bp, synthetic construct
  source 1..139: mol_type = other DNA
aggggtggggcttgctttaggggtggggcttgatctaggggtggggcttacgctaggggtggggcttgccgctaggggtggggcttgctttaggggtggggcttgatctaggggtggggcttacgctaggggtggggct

SEQ ID NO: 6855 - DNA, 139 bp, synthetic construct
  source 1..139: mol_type = other DNA
agccccaccccttgctttagccccaccccttgatctagccccaccccttacgctagccccaccccttgccgctagccccaccccttgctttagccccaccccttgatctagccccaccccttacgctagccccacccct

SEQ ID NO: 6856 - DNA, 139 bp, synthetic construct
  source 1..139: mol_type = other DNA
atgggcggggcctgctttatgggcggggcctgatctatgggcggggcctacgctatgggcggggcctgccgctatgggcggggcctgctttatgggcggggcctgatctatgggcggggcctacgctatgggcggggcc

SEQ ID NO: 6857 - DNA, 139 bp, synthetic construct
  source 1..139: mol_type = other DNA
ggccccgcccattgctttggccccgcccattgatctggccccgcccattacgctggccccgcccattgccgctggccccgcccattgctttggccccgcccattgatctggccccgcccattacgctggccccgcccat

SEQ ID NO: 6858 - DNA, 139 bp, synthetic construct
  source 1..139: mol_type = other DNA
atgggcggggcttgctttatgggcggggcttgatctatgggcggggcttacgctatgggcggggcttgccgctatgggcggggcttgctttatgggcggggcttgatctatgggcggggcttacgctatgggcggggct

SEQ ID NO: 6859 - DNA, 139 bp, synthetic construct
  source 1..139: mol_type = other DNA
agccccgcccattgctttagccccgcccattgatctagccccgcccattacgctagccccgcccattgccgctagccccgcccattgctttagccccgcccattgatctagccccgcccattacgctagccccgcccat

SEQ ID NO: 6860 - DNA, 139 bp, synthetic construct
  source 1..139: mol_type = other DNA
atgggtggggcctgctttatgggtggggcctgatctatgggtggggcctacgctatgggtggggcctgccgctatgggtggggcctgctttatgggtggggcctgatctatgggtggggcctacgctatgggtggggcc

SEQ ID NO: 6861 - DNA, 139 bp, synthetic construct
  source 1..139: mol_type = other DNA
ggccccacccattgctttggccccacccattgatctggccccacccattacgctggccccacccattgccgctggccccacccattgctttggccccacccattgatctggccccacccattacgctggccccacccat

SEQ ID NO: 6862 - DNA, 139 bp, synthetic construct
  source 1..139: mol_type = other DNA
atgggtggggcttgctttatgggtggggcttgatctatgggtggggcttacgctatgggtggggcttgccgctatgggtggggcttgctttatgggtggggcttgatctatgggtggggcttacgctatgggtggggct

SEQ ID NO: 6863 - DNA, 139 bp, synthetic construct
  source 1..139: mol_type = other DNA
agccccacccattgctttagccccacccattgatctagccccacccattacgctagccccacccattgccgctagccccacccattgctttagccccacccattgatctagccccacccattacgctagccccacccat

SEQ ID NO: 6864 - DNA, 139 bp, synthetic construct
  source 1..139: mol_type = other DNA
cagggcggggcctgctttcagggcggggcctgatctcagggcggggcctacgctcagggcggggcctgccgctcagggcggggcctgctttcagggcggggcctgatctcagggcggggcctacgctcagggcggggcc

SEQ ID NO: 6865 - DNA, 139 bp, synthetic construct
  source 1..139: mol_type = other DNA
ggccccgccctgtgctttggccccgccctgtgatctggccccgccctgtacgctggccccgccctgtgccgctggccccgccctgtgctttggccccgccctgtgatctggccccgccctgtacgctggccccgccctg

SEQ ID NO: 6866 - DNA, 139 bp, synthetic construct
  source 1..139: mol_type = other DNA
cagggcggggcttgctttcagggcggggcttgatctcagggcggggcttacgctcagggcggggcttgccgctcagggcggggcttgctttcagggcggggcttgatctcagggcggggcttacgctcagggcggggct

SEQ ID NO: 6867 - DNA, 139 bp, synthetic construct
  source 1..139: mol_type = other DNA
agccccgccctgtgctttagccccgccctgtgatctagccccgccctgtacgctagccccgccctgtgccgctagccccgccctgtgctttagccccgccctgtgatctagccccgccctgtacgctagccccgccctg

SEQ ID NO: 6868 - DNA, 139 bp, synthetic construct
  source 1..139: mol_type = other DNA
cagggtggggcctgctttcagggtggggcctgatctcagggtggggcctacgctcagggtggggcctgccgctcagggtggggcctgctttcagggtggggcctgatctcagggtggggcctacgctcagggtggggcc

SEQ ID NO: 6869 - DNA, 139 bp, synthetic construct
  source 1..139: mol_type = other DNA
ggccccaccctgtgctttggccccaccctgtgatctggccccaccctgtacgctggccccaccctgtgccgctggccccaccctgtgctttggccccaccctgtgatctggccccaccctgtacgctggccccaccctg

SEQ ID NO: 6870 - DNA, 139 bp, synthetic construct
  source 1..139: mol_type = other DNA
cagggtggggcttgctttcagggtggggcttgatctcagggtggggcttacgctcagggtggggcttgccgctcagggtggggcttgctttcagggtggggcttgatctcagggtggggcttacgctcagggtggggct

SEQ ID NO: 6871 - DNA, 139 bp, synthetic construct
  source 1..139: mol_type = other DNA
agccccaccctgtgctttagccccaccctgtgatctagccccaccctgtacgctagccccaccctgtgccgctagccccaccctgtgctttagccccaccctgtgatctagccccaccctgtacgctagccccaccctg

SEQ ID NO: 6872 - DNA, 139 bp, synthetic construct
  source 1..139: mol_type = other DNA
cggggcggggcctgctttcggggcggggcctgatctcggggcggggcctacgctcggggcggggcctgccgctcggggcggggcctgctttcggggcggggcctgatctcggggcggggcctacgctcggggcggggcc

SEQ ID NO: 6873 - DNA, 139 bp, synthetic construct
  source 1..139: mol_type = other DNA
ggccccgccccgtgctttggccccgccccgtgatctggccccgccccgtacgctggccccgccccgtgccgctggccccgccccgtgctttggccccgccccgtgatctggccccgccccgtacgctggccccgccccg

SEQ ID NO: 6874 - DNA, 139 bp, synthetic construct
  source 1..139: mol_type = other DNA
cggggcggggcttgctttcggggcggggcttgatctcggggcggggcttacgctcggggcggggcttgccgctcggggcggggcttgctttcggggcggggcttgatctcggggcggggcttacgctcggggcggggct

SEQ ID NO: 6875 - DNA, 139 bp, synthetic construct
  source 1..139: mol_type = other DNA
agccccgccccgtgctttagccccgccccgtgatctagccccgccccgtacgctagccccgccccgtgccgctagccccgccccgtgctttagccccgccccgtgatctagccccgccccgtacgctagccccgccccg

SEQ ID NO: 6876 - DNA, 139 bp, synthetic construct
  source 1..139: mol_type = other DNA
cggggtggggcctgctttcggggtggggcctgatctcggggtggggcctacgctcggggtggggcctgccgctcggggtggggcctgctttcggggtggggcctgatctcggggtggggcctacgctcggggtggggcc

SEQ ID NO: 6877 - DNA, 139 bp, synthetic construct
  source 1..139: mol_type = other DNA
ggccccaccccgtgctttggccccaccccgtgatctggccccaccccgtacgctggccccaccccgtgccgctggccccaccccgtgctttggccccaccccgtgatctggccccaccccgtacgctggccccaccccg

SEQ ID NO: 6878 - DNA, 139 bp, synthetic construct
  source 1..139: mol_type = other DNA
cggggtggggcttgctttcggggtggggcttgatctcggggtggggcttacgctcggggtggggcttgccgctcggggtggggcttgctttcggggtggggcttgatctcggggtggggcttacgctcggggtggggct

SEQ ID NO: 6879 - DNA, 139 bp, synthetic construct
  source 1..139: mol_type = other DNA
agccccaccccgtgctttagccccaccccgtgatctagccccaccccgtacgctagccccaccccgtgccgctagccccaccccgtgctttagccccaccccgtgatctagccccaccccgtacgctagccccaccccg

SEQ ID NO: 6880 - DNA, 139 bp, synthetic construct
  source 1..139: mol_type = other DNA
ctgggcggggcctgctttctgggcggggcctgatctctgggcggggcctacgctctgggcggggcctgccgctctgggcggggcctgctttctgggcggggcctgatctctgggcggggcctacgctctgggcggggcc

SEQ ID NO: 6881 - DNA, 139 bp, synthetic construct
  source 1..139: mol_type = other DNA
ggccccgcccagtgctttggccccgcccagtgatctggccccgcccagtacgctggccccgcccagtgccgctggccccgcccagtgctttggccccgcccagtgatctggccccgcccagtacgctggccccgcccag

SEQ ID NO: 6882 - DNA, 139 bp, synthetic construct
  source 1..139: mol_type = other DNA
ctgggcggggcttgctttctgggcggggcttgatctctgggcggggcttacgctctgggcggggcttgccgctctgggcggggcttgctttctgggcggggcttgatctctgggcggggcttacgctctgggcggggct

SEQ ID NO: 6883 - DNA, 139 bp, synthetic construct
  source 1..139: mol_type = other DNA
agccccgcccagtgctttagccccgcccagtgatctagccccgcccagtacgctagccccgcccagtgccgctagccccgcccagtgctttagccccgcccagtgatctagccccgcccagtacgctagccccgcccag

SEQ ID NO: 6884 - DNA, 139 bp, synthetic construct
  source 1..139: mol_type = other DNA
ctgggtggggcctgctttctgggtggggcctgatctctgggtggggcctacgctctgggtggggcctgccgctctgggtggggcctgctttctgggtggggcctgatctctgggtggggcctacgctctgggtggggcc

SEQ ID NO: 6885 - DNA, 139 bp, synthetic construct
  source 1..139: mol_type = other DNA
ggccccacccagtgctttggccccacccagtgatctggccccacccagtacgctggccccacccagtgccgctggccccacccagtgctttggccccacccagtgatctggccccacccagtacgctggccccacccag

SEQ ID NO: 6886 - DNA, 139 bp, synthetic construct
  source 1..139: mol_type = other DNA
ctgggtggggcttgctttctgggtggggcttgatctctgggtggggcttacgctctgggtggggcttgccgctctgggtggggcttgctttctgggtggggcttgatctctgggtggggcttacgctctgggtggggct

SEQ ID NO: 6887 - DNA, 139 bp, synthetic construct
  source 1..139: mol_type = other DNA
agccccacccagtgctttagccccacccagtgatctagccccacccagtacgctagccccacccagtgccgctagccccacccagtgctttagccccacccagtgatctagccccacccagtacgctagccccacccag

SEQ ID NO: 6888 - DNA, 139 bp, synthetic construct
  source 1..139: mol_type = other DNA
gagggcggggcctgctttgagggcggggcctgatctgagggcggggcctacgctgagggcggggcctgccgctgagggcggggcctgctttgagggcggggcctgatctgagggcggggcctacgctgagggcggggcc

SEQ ID NO: 6889 - DNA, 139 bp, synthetic construct
  source 1..139: mol_type = other DNA
ggccccgccctctgctttggccccgccctctgatctggccccgccctctacgctggccccgccctctgccgctggccccgccctctgctttggccccgccctctgatctggccccgccctctacgctggccccgccctc

SEQ ID NO: 6890 - DNA, 139 bp, synthetic construct
  source 1..139: mol_type = other DNA
gagggcggggcttgctttgagggcggggcttgatctgagggcggggcttacgctgagggcggggcttgccgctgagggcggggcttgctttgagggcggggcttgatctgagggcggggcttacgctgagggcggggct

SEQ ID NO: 6891 - DNA, 139 bp, synthetic construct
  source 1..139: mol_type = other DNA
agccccgccctctgctttagccccgccctctgatctagccccgccctctacgctagccccgccctctgccgctagccccgccctctgctttagccccgccctctgatctagccccgccctctacgctagccccgccctc

SEQ ID NO: 6892 - DNA, 139 bp, synthetic construct
  source 1..139: mol_type = other DNA
gagggtggggcctgctttgagggtggggcctgatctgagggtggggcctacgctgagggtggggcctgccgctgagggtggggcctgctttgagggtggggcctgatctgagggtggggcctacgctgagggtggggcc

SEQ ID NO: 6893 - DNA, 139 bp, synthetic construct
  source 1..139: mol_type = other DNA
ggccccaccctctgctttggccccaccctctgatctggccccaccctctacgctggccccaccctctgccgctggccccaccctctgctttggccccaccctctgatctggccccaccctctacgctggccccaccctc

SEQ ID NO: 6894 - DNA, 139 bp, synthetic construct
  source 1..139: mol_type = other DNA
gagggtggggcttgctttgagggtggggcttgatctgagggtggggcttacgctgagggtggggcttgccgctgagggtggggcttgctttgagggtggggcttgatctgagggtggggcttacgctgagggtggggct

SEQ ID NO: 6895 - DNA, 139 bp, synthetic construct
  source 1..139: mol_type = other DNA
agccccaccctctgctttagccccaccctctgatctagccccaccctctacgctagccccaccctctgccgctagccccaccctctgctttagccccaccctctgatctagccccaccctctacgctagccccaccctc

SEQ ID NO: 6896 - DNA, 139 bp, synthetic construct
  source 1..139: mol_type = other DNA
gggggcggggcctgctttgggggcggggcctgatctgggggcggggcctacgctgggggcggggcctgccgctgggggcggggcctgctttgggggcggggcctgatctgggggcggggcctacgctgggggcggggcc

SEQ ID NO: 6897 - DNA, 139 bp, synthetic construct
  source 1..139: mol_type = other DNA
ggccccgccccctgctttggccccgccccctgatctggccccgccccctacgctggccccgccccctgccgctggccccgccccctgctttggccccgccccctgatctggccccgccccctacgctggccccgccccc

SEQ ID NO: 6898 - DNA, 139 bp, synthetic construct
  source 1..139: mol_type = other DNA
gggggcggggcttgctttgggggcggggcttgatctgggggcggggcttacgctgggggcggggcttgccgctgggggcggggcttgctttgggggcggggcttgatctgggggcggggcttacgctgggggcggggct

SEQ ID NO: 6899 - DNA, 139 bp, synthetic construct
  source 1..139: mol_type = other DNA
agccccgccccctgctttagccccgccccctgatctagccccgccccctacgctagccccgccccctgccgctagccccgccccctgctttagccccgccccctgatctagccccgccccctacgctagccccgccccc

SEQ ID NO: 6900 - DNA, 139 bp, synthetic construct
  source 1..139: mol_type = other DNA
gggggtggggcctgctttgggggtggggcctgatctgggggtggggcctacgctgggggtggggcctgccgctgggggtggggcctgctttgggggtggggcctgatctgggggtggggcctacgctgggggtggggcc

SEQ ID NO: 6901 - DNA, 139 bp, synthetic construct
  source 1..139: mol_type = other DNA
ggccccaccccctgctttggccccaccccctgatctggccccaccccctacgctggccccaccccctgccgctggccccaccccctgctttggccccaccccctgatctggccccaccccctacgctggccccaccccc

SEQ ID NO: 6902 - DNA, 139 bp, synthetic construct
  source 1..139: mol_type = other DNA
gggggtggggcttgctttgggggtggggcttgatctgggggtggggcttacgctgggggtggggcttgccgctgggggtggggcttgctttgggggtggggcttgatctgggggtggggcttacgctgggggtggggct

SEQ ID NO: 6903 - DNA, 139 bp, synthetic construct
  source 1..139: mol_type = other DNA
agccccaccccctgctttagccccaccccctgatctagccccaccccctacgctagccccaccccctgccgctagccccaccccctgctttagccccaccccctgatctagccccaccccctacgctagccccaccccc

SEQ ID NO: 6904 - DNA, 139 bp, synthetic construct
  source 1..139: mol_type = other DNA
gtgggcggggcctgctttgtgggcggggcctgatctgtgggcggggcctacgctgtgggcggggcctgccgctgtgggcggggcctgctttgtgggcggggcctgatctgtgggcggggcctacgctgtgggcggggcc

SEQ ID NO: 6905 - DNA, 139 bp, synthetic construct
  source 1..139: mol_type = other DNA
ggccccgcccactgctttggccccgcccactgatctggccccgcccactacgctggccccgcccactgccgctggccccgcccactgctttggccccgcccactgatctggccccgcccactacgctggccccgcccac

SEQ ID NO: 6906 - DNA, 139 bp, synthetic construct
  source 1..139: mol_type = other DNA
gtgggcggggcttgctttgtgggcggggcttgatctgtgggcggggcttacgctgtgggcggggcttgccgctgtgggcggggcttgctttgtgggcggggcttgatctgtgggcggggcttacgctgtgggcggggct

SEQ ID NO: 6907 - DNA, 139 bp, synthetic construct
  source 1..139: mol_type = other DNA
agccccgcccactgctttagccccgcccactgatctagccccgcccactacgctagccccgcccactgccgctagccccgcccactgctttagccccgcccactgatctagccccgcccactacgctagccccgcccac

SEQ ID NO: 6908 - DNA, 139 bp, synthetic construct
  source 1..139: mol_type = other DNA
gtgggtggggcctgctttgtgggtggggcctgatctgtgggtggggcctacgctgtgggtggggcctgccgctgtgggtggggcctgctttgtgggtggggcctgatctgtgggtggggcctacgctgtgggtggggcc

SEQ ID NO: 6909 - DNA, 139 bp, synthetic construct
  source 1..139: mol_type = other DNA
ggccccacccactgctttggccccacccactgatctggccccacccactacgctggccccacccactgccgctggccccacccactgctttggccccacccactgatctggccccacccactacgctggccccacccac

SEQ ID NO: 6910 - DNA, 139 bp, synthetic construct
  source 1..139: mol_type = other DNA
gtgggtggggcttgctttgtgggtggggcttgatctgtgggtggggcttacgctgtgggtggggcttgccgctgtgggtggggcttgctttgtgggtggggcttgatctgtgggtggggcttacgctgtgggtggggct

SEQ ID NO: 6911 - DNA, 139 bp, synthetic construct
  source 1..139: mol_type = other DNA
agccccacccactgctttagccccacccactgatctagccccacccactacgctagccccacccactgccgctagccccacccactgctttagccccacccactgatctagccccacccactacgctagccccacccac

SEQ ID NO: 6912 - DNA, 146 bp, synthetic construct
  source 1..146: mol_type = other DNA
ccttatctctacgctccttatctctgccgctccttatctctgctttccttatctctgatctccttatctctacgctccttatctctgccgctccttatctctgctttccttatctctgatctccttatctctacgctccttatctc

SEQ ID NO: 6913 - DNA, 146 bp, synthetic construct
  source 1..146: mol_type = other DNA
gagataaggtacgctgagataaggtgccgctgagataaggtgctttgagataaggtgatctgagataaggtacgctgagataaggtgccgctgagataaggtgctttgagataaggtgatctgagataaggtacgctgagataagg

SEQ ID NO: 6914 - DNA, 139 bp, synthetic construct
  source 1..139: mol_type = other DNA
agggggcggagctgctttagggggcggagctgatctagggggcggagctacgctagggggcggagctgccgctagggggcggagctgctttagggggcggagctgatctagggggcggagctacgctagggggcggagc

SEQ ID NO: 6915 - DNA, 139 bp, synthetic construct
  source 1..139: mol_type = other DNA
gctccgcccccttgctttgctccgcccccttgatctgctccgcccccttacgctgctccgcccccttgccgctgctccgcccccttgctttgctccgcccccttgatctgctccgcccccttacgctgctccgccccct

SEQ ID NO: 6916 - DNA, 139 bp, synthetic construct
  source 1..139: mol_type = other DNA
agtgggcggagctgctttagtgggcggagctgatctagtgggcggagctacgctagtgggcggagctgccgctagtgggcggagctgctttagtgggcggagctgatctagtgggcggagctacgctagtgggcggagc

SEQ ID NO: 6917 - DNA, 139 bp, synthetic construct
  source 1..139: mol_type = other DNA
gctccgcccacttgctttgctccgcccacttgatctgctccgcccacttacgctgctccgcccacttgccgctgctccgcccacttgctttgctccgcccacttgatctgctccgcccacttacgctgctccgcccact

SEQ ID NO: 6918 - DNA, 139 bp, synthetic construct
  source 1..139: mol_type = other DNA
ggggggcggagctgctttggggggcggagctgatctggggggcggagctacgctggggggcggagctgccgctggggggcggagctgctttggggggcggagctgatctggggggcggagctacgctggggggcggagc

SEQ ID NO: 6919 - DNA, 139 bp, synthetic construct
  source 1..139: mol_type = other DNA
gctccgcccccctgctttgctccgcccccctgatctgctccgcccccctacgctgctccgcccccctgccgctgctccgcccccctgctttgctccgcccccctgatctgctccgcccccctacgctgctccgcccccc

SEQ ID NO: 6920 - DNA, 139 bp, synthetic construct
  source 1..139: mol_type = other DNA
ggtgggcggagctgctttggtgggcggagctgatctggtgggcggagctacgctggtgggcggagctgccgctggtgggcggagctgctttggtgggcggagctgatctggtgggcggagctacgctggtgggcggagc

SEQ ID NO: 6921 - DNA, 139 bp, synthetic construct
  source 1..139: mol_type = other DNA
gctccgcccacctgctttgctccgcccacctgatctgctccgcccacctacgctgctccgcccacctgccgctgctccgcccacctgctttgctccgcccacctgatctgctccgcccacctacgctgctccgcccacc

SEQ ID NO: 6922 - DNA, 135 bp, synthetic construct
  source 1..135: mol_type = other DNA
aaccgcaaaccgcatgatctaaccgcaaaccgcatacgctaaccgcaaaccgcatgccgctaaccgcaaaccgcatgctttaaccgcaaaccgcatgatctaaccgcaaaccgcatacgctaaccgcaaaccgca

SEQ ID NO: 6923 - DNA, 135 bp, synthetic construct
  source 1..135: mol_type = other DNA
tgcggtttgcggtttgatcttgcggtttgcggtttacgcttgcggtttgcggtttgccgcttgcggtttgcggtttgcttttgcggtttgcggtttgatcttgcggtttgcggtttacgcttgcggtttgcggtt

SEQ ID NO: 6924 - DNA, 135 bp, synthetic construct
  source 1..135: mol_type = other DNA
gaccgcaaaccgcatgatctgaccgcaaaccgcatacgctgaccgcaaaccgcatgccgctgaccgcaaaccgcatgctttgaccgcaaaccgcatgatctgaccgcaaaccgcatacgctgaccgcaaaccgca

SEQ ID NO: 6925 - DNA, 135 bp, synthetic construct
  source 1..135: mol_type = other DNA
tgcggtttgcggtctgatcttgcggtttgcggtctacgcttgcggtttgcggtctgccgcttgcggtttgcggtctgcttttgcggtttgcggtctgatcttgcggtttgcggtctacgcttgcggtttgcggtc

SEQ ID NO: 6926 - DNA, 140 bp, synthetic construct
  source 1..140: mol_type = other DNA
caactgtgctttcaactgtgatctcaactgtacgctcaactgtgccgctcaactgtgctttcaactgtgatctcaactgtacgctcaactgtgccgctcaactgtgctttcaactgtgatctcaactgtacgctcaactg

SEQ ID NO: 6927 - DNA, 140 bp, synthetic construct
  source 1..140: mol_type = other DNA
cagttgtgctttcagttgtgatctcagttgtacgctcagttgtgccgctcagttgtgctttcagttgtgatctcagttgtacgctcagttgtgccgctcagttgtgctttcagttgtgatctcagttgtacgctcagttg

SEQ ID NO: 6928 - DNA, 139 bp, synthetic construct
  source 1..139: mol_type = other DNA
acaggatgtggttgctttacaggatgtggttgatctacaggatgtggttacgctacaggatgtggttgccgctacaggatgtggttgctttacaggatgtggttgatctacaggatgtggttacgctacaggatgtggt

SEQ ID NO: 6929 - DNA, 139 bp, synthetic construct
  source 1..139: mol_type = other DNA
accacatcctgttgctttaccacatcctgttgatctaccacatcctgttacgctaccacatcctgttgccgctaccacatcctgttgctttaccacatcctgttgatctaccacatcctgttacgctaccacatcctgt

SEQ ID NO: 6930 - DNA, 146 bp, synthetic construct
  source 1..146: mol_type = other DNA
aaaccgccatacgctaaaccgccatgccgctaaaccgccatgctttaaaccgccatgatctaaaccgccatacgctaaaccgccatgccgctaaaccgccatgctttaaaccgccatgatctaaaccgccatacgctaaaccgcca

SEQ ID NO: 6931 - DNA, 146 bp, synthetic construct
  source 1..146: mol_type = other DNA
tggcggttttacgcttggcggttttgccgcttggcggttttgcttttggcggttttgatcttggcggttttacgcttggcggttttgccgcttggcggttttgcttttggcggttttgatcttggcggttttacgcttggcggttt

SEQ ID NO: 6932 - DNA, 146 bp, synthetic construct
  source 1..146: mol_type = other DNA
aaaccgccctacgctaaaccgccctgccgctaaaccgccctgctttaaaccgccctgatctaaaccgccctacgctaaaccgccctgccgctaaaccgccctgctttaaaccgccctgatctaaaccgccctacgctaaaccgccc

SEQ ID NO: 6933 - DNA, 146 bp, synthetic construct
  source 1..146: mol_type = other DNA
gggcggttttacgctgggcggttttgccgctgggcggttttgctttgggcggttttgatctgggcggttttacgctgggcggttttgccgctgggcggttttgctttgggcggttttgatctgggcggttttacgctgggcggttt

SEQ ID NO: 6934 - DNA, 146 bp, synthetic construct
  source 1..146: mol_type = other DNA
aaaccgccgtacgctaaaccgccgtgccgctaaaccgccgtgctttaaaccgccgtgatctaaaccgccgtacgctaaaccgccgtgccgctaaaccgccgtgctttaaaccgccgtgatctaaaccgccgtacgctaaaccgccg

SEQ ID NO: 6935 - DNA, 146 bp, synthetic construct
  source 1..146: mol_type = other DNA
cggcggttttacgctcggcggttttgccgctcggcggttttgctttcggcggttttgatctcggcggttttacgctcggcggttttgccgctcggcggttttgctttcggcggttttgatctcggcggttttacgctcggcggttt

SEQ ID NO: 6936 - DNA, 146 bp, synthetic construct
  source 1..146: mol_type = other DNA
aaaccgctatacgctaaaccgctatgccgctaaaccgctatgctttaaaccgctatgatctaaaccgctatacgctaaaccgctatgccgctaaaccgctatgctttaaaccgctatgatctaaaccgctatacgctaaaccgcta

SEQ ID NO: 6937 - DNA, 146 bp, synthetic construct
  source 1..146: mol_type = other DNA
tagcggttttacgcttagcggttttgccgcttagcggttttgcttttagcggttttgatcttagcggttttacgcttagcggttttgccgcttagcggttttgcttttagcggttttgatcttagcggttttacgcttagcggttt

SEQ ID NO: 6938 - DNA, 146 bp, synthetic construct
  source 1..146: mol_type = other DNA
aaaccgctctacgctaaaccgctctgccgctaaaccgctctgctttaaaccgctctgatctaaaccgctctacgctaaaccgctctgccgctaaaccgctctgctttaaaccgctctgatctaaaccgctctacgctaaaccgctc

SEQ ID NO: 6939 - DNA, 146 bp, synthetic construct
  source 1..146: mol_type = other DNA
gagcggttttacgctgagcggttttgccgctgagcggttttgctttgagcggttttgatctgagcggttttacgctgagcggttttgccgctgagcggttttgctttgagcggttttgatctgagcggttttacgctgagcggttt

SEQ ID NO: 6940 - DNA, 146 bp, synthetic construct
  source 1..146: mol_type = other DNA
aaaccgctgtacgctaaaccgctgtgccgctaaaccgctgtgctttaaaccgctgtgatctaaaccgctgtacgctaaaccgctgtgccgctaaaccgctgtgctttaaaccgctgtgatctaaaccgctgtacgctaaaccgctg

SEQ ID NO: 6941 - DNA, 146 bp, synthetic construct
  source 1..146: mol_type = other DNA
cagcggttttacgctcagcggttttgccgctcagcggttttgctttcagcggttttgatctcagcggttttacgctcagcggttttgccgctcagcggttttgctttcagcggttttgatctcagcggttttacgctcagcggttt

SEQ ID NO: 6942 - DNA, 146 bp, synthetic construct
  source 1..146: mol_type = other DNA
aaaccgtcatacgctaaaccgtcatgccgctaaaccgtcatgctttaaaccgtcatgatctaaaccgtcatacgctaaaccgtcatgccgctaaaccgtcatgctttaaaccgtcatgatctaaaccgtcatacgctaaaccgtca

SEQ ID NO: 6943 - DNA, 146 bp, synthetic construct
  source 1..146: mol_type = other DNA
tgacggttttacgcttgacggttttgccgcttgacggttttgcttttgacggttttgatcttgacggttttacgcttgacggttttgccgcttgacggttttgcttttgacggttttgatcttgacggttttacgcttgacggttt

SEQ ID NO: 6944 - DNA, 146 bp, synthetic construct
  source 1..146: mol_type = other DNA
aaaccgtcctacgctaaaccgtcctgccgctaaaccgtcctgctttaaaccgtcctgatctaaaccgtcctacgctaaaccgtcctgccgctaaaccgtcctgctttaaaccgtcctgatctaaaccgtcctacgctaaaccgtcc

SEQ ID NO: 6945 - DNA, 146 bp, synthetic construct
  source 1..146: mol_type = other DNA
ggacggttttacgctggacggttttgccgctggacggttttgctttggacggttttgatctggacggttttacgctggacggttttgccgctggacggttttgctttggacggttttgatctggacggttttacgctggacggttt

SEQ ID NO: 6946 - DNA, 146 bp, synthetic construct
  source 1..146: mol_type = other DNA
aaaccgtcgtacgctaaaccgtcgtgccgctaaaccgtcgtgctttaaaccgtcgtgatctaaaccgtcgtacgctaaaccgtcgtgccgctaaaccgtcgtgctttaaaccgtcgtgatctaaaccgtcgtacgctaaaccgtcg

SEQ ID NO: 6947 - DNA, 146 bp, synthetic construct
  source 1..146: mol_type = other DNA
cgacggttttacgctcgacggttttgccgctcgacggttttgctttcgacggttttgatctcgacggttttacgctcgacggttttgccgctcgacggttttgctttcgacggttttgatctcgacggttttacgctcgacggttt

SEQ ID NO: 6948 - DNA, 146 bp, synthetic construct
  source 1..146: mol_type = other DNA
aaaccgttatacgctaaaccgttatgccgctaaaccgttatgctttaaaccgttatgatctaaaccgttatacgctaaaccgttatgccgctaaaccgttatgctttaaaccgttatgatctaaaccgttatacgctaaaccgtta

SEQ ID NO: 6949 - DNA, 146 bp, synthetic construct
  source 1..146: mol_type = other DNA
taacggttttacgcttaacggttttgccgcttaacggttttgcttttaacggttttgatcttaacggttttacgcttaacggttttgccgcttaacggttttgcttttaacggttttgatcttaacggttttacgcttaacggttt

SEQ ID NO: 6950 - DNA, 146 bp, synthetic construct
  source 1..146: mol_type = other DNA
aaaccgttctacgctaaaccgttctgccgctaaaccgttctgctttaaaccgttctgatctaaaccgttctacgctaaaccgttctgccgctaaaccgttctgctttaaaccgttctgatctaaaccgttctacgctaaaccgttc

SEQ ID NO: 6951 - DNA, 146 bp, synthetic construct
  source 1..146: mol_type = other DNA
gaacggttttacgctgaacggttttgccgctgaacggttttgctttgaacggttttgatctgaacggttttacgctgaacggttttgccgctgaacggttttgctttgaacggttttgatctgaacggttttacgctgaacggttt

SEQ ID NO: 6952 - DNA, 146 bp, synthetic construct
  source 1..146: mol_type = other DNA
aaaccgttgtacgctaaaccgttgtgccgctaaaccgttgtgctttaaaccgttgtgatctaaaccgttgtacgctaaaccgttgtgccgctaaaccgttgtgctttaaaccgttgtgatctaaaccgttgtacgctaaaccgttg

SEQ ID NO: 6953 - DNA, 146 bp, synthetic construct
  source 1..146: mol_type = other DNA
caacggttttacgctcaacggttttgccgctcaacggttttgctttcaacggttttgatctcaacggttttacgctcaacggttttgccgctcaacggttttgctttcaacggttttgatctcaacggttttacgctcaacggttt

SEQ ID NO: 6954 - DNA, 146 bp, synthetic construct
  source 1..146: mol_type = other DNA
aaacggccatacgctaaacggccatgccgctaaacggccatgctttaaacggccatgatctaaacggccatacgctaaacggccatgccgctaaacggccatgctttaaacggccatgatctaaacggccatacgctaaacggcca

SEQ ID NO: 6955 - DNA, 146 bp, synthetic construct
  source 1..146: mol_type = other DNA
tggccgttttacgcttggccgttttgccgcttggccgttttgcttttggccgttttgatcttggccgttttacgcttggccgttttgccgcttggccgttttgcttttggccgttttgatcttggccgttttacgcttggccgttt

SEQ ID NO: 6956 - DNA, 146 bp, synthetic construct
  source 1..146: mol_type = other DNA
aaacggccctacgctaaacggccctgccgctaaacggccctgctttaaacggccctgatctaaacggccctacgctaaacggccctgccgctaaacggccctgctttaaacggccctgatctaaacggccctacgctaaacggccc

SEQ ID NO: 6957 - DNA, 146 bp, synthetic construct
  source 1..146: mol_type = other DNA
gggccgttttacgctgggccgttttgccgctgggccgttttgctttgggccgttttgatctgggccgttttacgctgggccgttttgccgctgggccgttttgctttgggccgttttgatctgggccgttttacgctgggccgttt

SEQ ID NO: 6958 - DNA, 146 bp, synthetic construct
  source 1..146: mol_type = other DNA
aaacggccgtacgctaaacggccgtgccgctaaacggccgtgctttaaacggccgtgatctaaacggccgtacgctaaacggccgtgccgctaaacggccgtgctttaaacggccgtgatctaaacggccgtacgctaaacggccg

SEQ ID NO: 6959 - DNA, 146 bp, synthetic construct
  source 1..146: mol_type = other DNA
cggccgttttacgctcggccgttttgccgctcggccgttttgctttcggccgttttgatctcggccgttttacgctcggccgttttgccgctcggccgttttgctttcggccgttttgatctcggccgttttacgctcggccgttt

SEQ ID NO: 6960 - DNA, 146 bp, synthetic construct
  source 1..146: mol_type = other DNA
aaacggctatacgctaaacggctatgccgctaaacggctatgctttaaacggctatgatctaaacggctatacgctaaacggctatgccgctaaacggctatgctttaaacggctatgatctaaacggctatacgctaaacggcta

SEQ ID NO: 6961 - DNA, 146 bp, synthetic construct
  source 1..146: mol_type = other DNA
tagccgttttacgcttagccgttttgccgcttagccgttttgcttttagccgttttgatcttagccgttttacgcttagccgttttgccgcttagccgttttgcttttagccgttttgatcttagccgttttacgcttagccgttt

SEQ ID NO: 6962 - DNA, 146 bp, synthetic construct
  source 1..146: mol_type = other DNA
aaacggctctacgctaaacggctctgccgctaaacggctctgctttaaacggctctgatctaaacggctctacgctaaacggctctgccgctaaacggctctgctttaaacggctctgatctaaacggctctacgctaaacggctc

SEQ ID NO: 6963 - DNA, 146 bp, synthetic construct
  source 1..146: mol_type = other DNA
gagccgttttacgctgagccgttttgccgctgagccgttttgctttgagccgttttgatctgagccgttttacgctgagccgttttgccgctgagccgttttgctttgagccgttttgatctgagccgttttacgctgagccgttt

SEQ ID NO: 6964 - DNA, 146 bp, synthetic construct
  source 1..146: mol_type = other DNA
aaacggctgtacgctaaacggctgtgccgctaaacggctgtgctttaaacggctgtgatctaaacggctgtacgctaaacggctgtgccgctaaacggctgtgctttaaacggctgtgatctaaacggctgtacgctaaacggctg

SEQ ID NO: 6965 - DNA, 146 bp, synthetic construct
  source 1..146: mol_type = other DNA
cagccgttttacgctcagccgttttgccgctcagccgttttgctttcagccgttttgatctcagccgttttacgctcagccgttttgccgctcagccgttttgctttcagccgttttgatctcagccgttttacgctcagccgttt

SEQ ID NO: 6966 - DNA, 146 bp, synthetic construct
  source 1..146: mol_type = other DNA
aaacggtcatacgctaaacggtcatgccgctaaacggtcatgctttaaacggtcatgatctaaacggtcatacgctaaacggtcatgccgctaaacggtcatgctttaaacggtcatgatctaaacggtcatacgctaaacggtca

SEQ ID NO: 6967 - DNA, 146 bp, synthetic construct
  source 1..146: mol_type = other DNA
tgaccgttttacgcttgaccgttttgccgcttgaccgttttgcttttgaccgttttgatcttgaccgttttacgcttgaccgttttgccgcttgaccgttttgcttttgaccgttttgatcttgaccgttttacgcttgaccgttt

SEQ ID NO: 6968 - DNA, 146 bp, synthetic construct
  source 1..146: mol_type = other DNA
aaacggtcctacgctaaacggtcctgccgctaaacggtcctgctttaaacggtcctgatctaaacggtcctacgctaaacggtcctgccgctaaacggtcctgctttaaacggtcctgatctaaacggtcctacgctaaacggtcc

SEQ ID NO: 6969 - DNA, 146 bp, synthetic construct
  source 1..146: mol_type = other DNA
ggaccgttttacgctggaccgttttgccgctggaccgttttgctttggaccgttttgatctggaccgttttacgctggaccgttttgccgctggaccgttttgctttggaccgttttgatctggaccgttttacgctggaccgttt

SEQ ID NO: 6970 - DNA, 146 bp, synthetic construct
  source 1..146: mol_type = other DNA
aaacggtcgtacgctaaacggtcgtgccgctaaacggtcgtgctttaaacggtcgtgatctaaacggtcgtacgctaaacggtcgtgccgctaaacggtcgtgctttaaacggtcgtgatctaaacggtcgtacgctaaacggtcg

SEQ ID NO: 6971 - DNA, 146 bp, synthetic construct
  source 1..146: mol_type = other DNA
cgaccgttttacgctcgaccgttttgccgctcgaccgttttgctttcgaccgttttgatctcgaccgttttacgctcgaccgttttgccgctcgaccgttttgctttcgaccgttttgatctcgaccgttttacgctcgaccgttt

SEQ ID NO: 6972 - DNA, 146 bp, synthetic construct
  source 1..146: mol_type = other DNA
aaacggttatacgctaaacggttatgccgctaaacggttatgctttaaacggttatgatctaaacggttatacgctaaacggttatgccgctaaacggttatgctttaaacggttatgatctaaacggttatacgctaaacggtta

SEQ ID NO: 6973 - DNA, 146 bp, synthetic construct
  source 1..146: mol_type = other DNA
taaccgttttacgcttaaccgttttgccgcttaaccgttttgcttttaaccgttttgatcttaaccgttttacgcttaaccgttttgccgcttaaccgttttgcttttaaccgttttgatcttaaccgttttacgcttaaccgttt

SEQ ID NO: 6974 - DNA, 146 bp, synthetic construct
  source 1..146: mol_type = other DNA
aaacggttctacgctaaacggttctgccgctaaacggttctgctttaaacggttctgatctaaacggttctacgctaaacggttctgccgctaaacggttctgctttaaacggttctgatctaaacggttctacgctaaacggttc

SEQ ID NO: 6975 - DNA, 146 bp, synthetic construct
  source 1..146: mol_type = other DNA
gaaccgttttacgctgaaccgttttgccgctgaaccgttttgctttgaaccgttttgatctgaaccgttttacgctgaaccgttttgccgctgaaccgttttgctttgaaccgttttgatctgaaccgttttacgctgaaccgttt

SEQ ID NO: 6976 - DNA, 146 bp, synthetic construct
  source 1..146: mol_type = other DNA
aaacggttgtacgctaaacggttgtgccgctaaacggttgtgctttaaacggttgtgatctaaacggttgtacgctaaacggttgtgccgctaaacggttgtgctttaaacggttgtgatctaaacggttgtacgctaaacggttg

SEQ ID NO: 6977 - DNA, 146 bp, synthetic construct
  source 1..146: mol_type = other DNA
caaccgttttacgctcaaccgttttgccgctcaaccgttttgctttcaaccgttttgatctcaaccgttttacgctcaaccgttttgccgctcaaccgttttgctttcaaccgttttgatctcaaccgttttacgctcaaccgttt

SEQ ID NO: 6978 - DNA, 146 bp, synthetic construct
  source 1..146: mol_type = other DNA
aaactgccatacgctaaactgccatgccgctaaactgccatgctttaaactgccatgatctaaactgccatacgctaaactgccatgccgctaaactgccatgctttaaactgccatgatctaaactgccatacgctaaactgcca

SEQ ID NO: 6979 - DNA, 146 bp, synthetic construct
  source 1..146: mol_type = other DNA
tggcagttttacgcttggcagttttgccgcttggcagttttgcttttggcagttttgatcttggcagttttacgcttggcagttttgccgcttggcagttttgcttttggcagttttgatcttggcagttttacgcttggcagttt

SEQ ID NO: 6980 - DNA, 146 bp, synthetic construct
  source 1..146: mol_type = other DNA
aaactgccctacgctaaactgccctgccgctaaactgccctgctttaaactgccctgatctaaactgccctacgctaaactgccctgccgctaaactgccctgctttaaactgccctgatctaaactgccctacgctaaactgccc

SEQ ID NO: 6981 - DNA, 146 bp, synthetic construct
  source 1..146: mol_type = other DNA
gggcagttttacgctgggcagttttgccgctgggcagttttgctttgggcagttttgatctgggcagttttacgctgggcagttttgccgctgggcagttttgctttgggcagttttgatctgggcagttttacgctgggcagttt

SEQ ID NO: 6982 - DNA, 146 bp, synthetic construct
  source 1..146: mol_type = other DNA
aaactgccgtacgctaaactgccgtgccgctaaactgccgtgctttaaactgccgtgatctaaactgccgtacgctaaactgccgtgccgctaaactgccgtgctttaaactgccgtgatctaaactgccgtacgctaaactgccg

SEQ ID NO: 6983 - DNA, 146 bp, synthetic construct
  source 1..146: mol_type = other DNA
cggcagttttacgctcggcagttttgccgctcggcagttttgctttcggcagttttgatctcggcagttttacgctcggcagttttgccgctcggcagttttgctttcggcagttttgatctcggcagttttacgctcggcagttt

SEQ ID NO: 6984 - DNA, 146 bp, synthetic construct
  source 1..146: mol_type = other DNA
aaactgctatacgctaaactgctatgccgctaaactgctatgctttaaactgctatgatctaaactgctatacgctaaactgctatgccgctaaactgctatgctttaaactgctatgatctaaactgctatacgctaaactgcta

SEQ ID NO: 6985 - DNA, 146 bp, synthetic construct
  source 1..146: mol_type = other DNA
tagcagttttacgcttagcagttttgccgcttagcagttttgcttttagcagttttgatcttagcagttttacgcttagcagttttgccgcttagcagttttgcttttagcagttttgatcttagcagttttacgcttagcagttt

SEQ ID NO: 6986 - DNA, 146 bp, synthetic construct
  source 1..146: mol_type = other DNA
aaactgctctacgctaaactgctctgccgctaaactgctctgctttaaactgctctgatctaaactgctctacgctaaactgctctgccgctaaactgctctgctttaaactgctctgatctaaactgctctacgctaaactgctc

SEQ ID NO: 6987 - DNA, 146 bp, synthetic construct
  source 1..146: mol_type = other DNA
gagcagttttacgctgagcagttttgccgctgagcagttttgctttgagcagttttgatctgagcagttttacgctgagcagttttgccgctgagcagttttgctttgagcagttttgatctgagcagttttacgctgagcagttt

SEQ ID NO: 6988 - DNA, 146 bp, synthetic construct
  source 1..146: mol_type = other DNA
aaactgctgtacgctaaactgctgtgccgctaaactgctgtgctttaaactgctgtgatctaaactgctgtacgctaaactgctgtgccgctaaactgctgtgctttaaactgctgtgatctaaactgctgtacgctaaactgctg

SEQ ID NO: 6989 - DNA, 146 bp, synthetic construct
  source 1..146: mol_type = other DNA
cagcagttttacgctcagcagttttgccgctcagcagttttgctttcagcagttttgatctcagcagttttacgctcagcagttttgccgctcagcagttttgctttcagcagttttgatctcagcagttttacgctcagcagttt

SEQ ID NO: 6990 - DNA, 146 bp, synthetic construct
  source 1..146: mol_type = other DNA
aaactgtcatacgctaaactgtcatgccgctaaactgtcatgctttaaactgtcatgatctaaactgtcatacgctaaactgtcatgccgctaaactgtcatgctttaaactgtcatgatctaaactgtcatacgctaaactgtca

SEQ ID NO: 6991 - DNA, 146 bp, synthetic construct
  source 1..146: mol_type = other DNA
tgacagttttacgcttgacagttttgccgcttgacagttttgcttttgacagttttgatcttgacagttttacgcttgacagttttgccgcttgacagttttgcttttgacagttttgatcttgacagttttacgcttgacagttt

SEQ ID NO: 6992 - DNA, 146 bp, synthetic construct
  source 1..146: mol_type = other DNA
aaactgtcctacgctaaactgtcctgccgctaaactgtcctgctttaaactgtcctgatctaaactgtcctacgctaaactgtcctgccgctaaactgtcctgctttaaactgtcctgatctaaactgtcctacgctaaactgtcc

SEQ ID NO: 6993 - DNA, 146 bp, synthetic construct
  source 1..146: mol_type = other DNA
ggacagttttacgctggacagttttgccgctggacagttttgctttggacagttttgatctggacagttttacgctggacagttttgccgctggacagttttgctttggacagttttgatctggacagttttacgctggacagttt

SEQ ID NO: 6994 - DNA, 146 bp, synthetic construct
  source 1..146: mol_type = other DNA
aaactgtcgtacgctaaactgtcgtgccgctaaactgtcgtgctttaaactgtcgtgatctaaactgtcgtacgctaaactgtcgtgccgctaaactgtcgtgctttaaactgtcgtgatctaaactgtcgtacgctaaactgtcg

SEQ ID NO: 6995 - DNA, 146 bp, synthetic construct
  source 1..146: mol_type = other DNA
cgacagttttacgctcgacagttttgccgctcgacagttttgctttcgacagttttgatctcgacagttttacgctcgacagttttgccgctcgacagttttgctttcgacagttttgatctcgacagttttacgctcgacagttt

SEQ ID NO: 6996 - DNA, 146 bp, synthetic construct
  source 1..146: mol_type = other DNA
aaactgttatacgctaaactgttatgccgctaaactgttatgctttaaactgttatgatctaaactgttatacgctaaactgttatgccgctaaactgttatgctttaaactgttatgatctaaactgttatacgctaaactgtta

SEQ ID NO: 6997 - DNA, 146 bp, synthetic construct
  source 1..146: mol_type = other DNA
taacagttttacgcttaacagttttgccgcttaacagttttgcttttaacagttttgatcttaacagttttacgcttaacagttttgccgcttaacagttttgcttttaacagttttgatcttaacagttttacgcttaacagttt

SEQ ID NO: 6998 - DNA, 146 bp, synthetic construct
  source 1..146: mol_type = other DNA
aaactgttctacgctaaactgttctgccgctaaactgttctgctttaaactgttctgatctaaactgttctacgctaaactgttctgccgctaaactgttctgctttaaactgttctgatctaaactgttctacgctaaactgttc

SEQ ID NO: 6999 - DNA, 146 bp, synthetic construct
  source 1..146: mol_type = other DNA
gaacagttttacgctgaacagttttgccgctgaacagttttgctttgaacagttttgatctgaacagttttacgctgaacagttttgccgctgaacagttttgctttgaacagttttgatctgaacagttttacgctgaacagttt

SEQ ID NO: 7000 - DNA, 146 bp, synthetic construct
  source 1..146: mol_type = other DNA
aaactgttgtacgctaaactgttgtgccgctaaactgttgtgctttaaactgttgtgatctaaactgttgtacgctaaactgttgtgccgctaaactgttgtgctttaaactgttgtgatctaaactgttgtacgctaaactgttg

SEQ ID NO: 7001 - DNA, 146 bp, synthetic construct
  source 1..146: mol_type = other DNA
caacagttttacgctcaacagttttgccgctcaacagttttgctttcaacagttttgatctcaacagttttacgctcaacagttttgccgctcaacagttttgctttcaacagttttgatctcaacagttttacgctcaacagttt

SEQ ID NO: 7002 - DNA, 146 bp, synthetic construct
  source 1..146: mol_type = other DNA
caaccgccatacgctcaaccgccatgccgctcaaccgccatgctttcaaccgccatgatctcaaccgccatacgctcaaccgccatgccgctcaaccgccatgctttcaaccgccatgatctcaaccgccatacgctcaaccgcca

SEQ ID NO: 7003 - DNA, 146 bp, synthetic construct
  source 1..146: mol_type = other DNA
tggcggttgtacgcttggcggttgtgccgcttggcggttgtgcttttggcggttgtgatcttggcggttgtacgcttggcggttgtgccgcttggcggttgtgcttttggcggttgtgatcttggcggttgtacgcttggcggttg

SEQ ID NO: 7004 - DNA, 146 bp, synthetic construct
  source 1..146: mol_type = other DNA
caaccgccctacgctcaaccgccctgccgctcaaccgccctgctttcaaccgccctgatctcaaccgccctacgctcaaccgccctgccgctcaaccgccctgctttcaaccgccctgatctcaaccgccctacgctcaaccgccc

SEQ ID NO: 7005 - DNA, 146 bp, synthetic construct
  source 1..146: mol_type = other DNA
gggcggttgtacgctgggcggttgtgccgctgggcggttgtgctttgggcggttgtgatctgggcggttgtacgctgggcggttgtgccgctgggcggttgtgctttgggcggttgtgatctgggcggttgtacgctgggcggttg

SEQ ID NO: 7006 - DNA, 146 bp, synthetic construct
  source 1..146: mol_type = other DNA
caaccgccgtacgctcaaccgccgtgccgctcaaccgccgtgctttcaaccgccgtgatctcaaccgccgtacgctcaaccgccgtgccgctcaaccgccgtgctttcaaccgccgtgatctcaaccgccgtacgctcaaccgccg

SEQ ID NO: 7007 - DNA, 146 bp, synthetic construct
  source 1..146: mol_type = other DNA
cggcggttgtacgctcggcggttgtgccgctcggcggttgtgctttcggcggttgtgatctcggcggttgtacgctcggcggttgtgccgctcggcggttgtgctttcggcggttgtgatctcggcggttgtacgctcggcggttg

SEQ ID NO: 7008 - DNA, 146 bp, synthetic construct
  source 1..146: mol_type = other DNA
caaccgctatacgctcaaccgctatgccgctcaaccgctatgctttcaaccgctatgatctcaaccgctatacgctcaaccgctatgccgctcaaccgctatgctttcaaccgctatgatctcaaccgctatacgctcaaccgcta

SEQ ID NO: 7009 - DNA, 146 bp, synthetic construct
  source 1..146: mol_type = other DNA
tagcggttgtacgcttagcggttgtgccgcttagcggttgtgcttttagcggttgtgatcttagcggttgtacgcttagcggttgtgccgcttagcggttgtgcttttagcggttgtgatcttagcggttgtacgcttagcggttg

SEQ ID NO: 7010 - DNA, 146 bp, synthetic construct
  source 1..146: mol_type = other DNA
caaccgctctacgctcaaccgctctgccgctcaaccgctctgctttcaaccgctctgatctcaaccgctctacgctcaaccgctctgccgctcaaccgctctgctttcaaccgctctgatctcaaccgctctacgctcaaccgctc

SEQ ID NO: 7011 - DNA, 146 bp, synthetic construct
  source 1..146: mol_type = other DNA
gagcggttgtacgctgagcggttgtgccgctgagcggttgtgctttgagcggttgtgatctgagcggttgtacgctgagcggttgtgccgctgagcggttgtgctttgagcggttgtgatctgagcggttgtacgctgagcggttg

SEQ ID NO: 7012 - DNA, 146 bp, synthetic construct
  source 1..146: mol_type = other DNA
caaccgctgtacgctcaaccgctgtgccgctcaaccgctgtgctttcaaccgctgtgatctcaaccgctgtacgctcaaccgctgtgccgctcaaccgctgtgctttcaaccgctgtgatctcaaccgctgtacgctcaaccgctg

SEQ ID NO: 7013 - DNA, 146 bp, synthetic construct
  source 1..146: mol_type = other DNA
cagcggttgtacgctcagcggttgtgccgctcagcggttgtgctttcagcggttgtgatctcagcggttgtacgctcagcggttgtgccgctcagcggttgtgctttcagcggttgtgatctcagcggttgtacgctcagcggttg

SEQ ID NO: 7014 - DNA, 146 bp, synthetic construct
  source 1..146: mol_type = other DNA
caaccgtcatacgctcaaccgtcatgccgctcaaccgtcatgctttcaaccgtcatgatctcaaccgtcatacgctcaaccgtcatgccgctcaaccgtcatgctttcaaccgtcatgatctcaaccgtcatacgctcaaccgtca

SEQ ID NO: 7015 - DNA, 146 bp, synthetic construct
  source 1..146: mol_type = other DNA
tgacggttgtacgcttgacggttgtgccgcttgacggttgtgcttttgacggttgtgatcttgacggttgtacgcttgacggttgtgccgcttgacggttgtgcttttgacggttgtgatcttgacggttgtacgcttgacggttg

SEQ ID NO: 7016 - DNA, 146 bp, synthetic construct
  source 1..146: mol_type = other DNA
caaccgtcctacgctcaaccgtcctgccgctcaaccgtcctgctttcaaccgtcctgatctcaaccgtcctacgctcaaccgtcctgccgctcaaccgtcctgctttcaaccgtcctgatctcaaccgtcctacgctcaaccgtcc

SEQ ID NO: 7017 - DNA, 146 bp, synthetic construct
  source 1..146: mol_type = other DNA
ggacggttgtacgctggacggttgtgccgctggacggttgtgctttggacggttgtgatctggacggttgtacgctggacggttgtgccgctggacggttgtgctttggacggttgtgatctggacggttgtacgctggacggttg

SEQ ID NO: 7018 - DNA, 146 bp, synthetic construct
  source 1..146: mol_type = other DNA
caaccgtcgtacgctcaaccgtcgtgccgctcaaccgtcgtgctttcaaccgtcgtgatctcaaccgtcgtacgctcaaccgtcgtgccgctcaaccgtcgtgctttcaaccgtcgtgatctcaaccgtcgtacgctcaaccgtcg

SEQ ID NO: 7019 - DNA, 146 bp, synthetic construct
  source 1..146: mol_type = other DNA
cgacggttgtacgctcgacggttgtgccgctcgacggttgtgctttcgacggttgtgatctcgacggttgtacgctcgacggttgtgccgctcgacggttgtgctttcgacggttgtgatctcgacggttgtacgctcgacggttg

SEQ ID NO: 7020 - DNA, 146 bp, synthetic construct
  source 1..146: mol_type = other DNA
caaccgttatacgctcaaccgttatgccgctcaaccgttatgctttcaaccgttatgatctcaaccgttatacgctcaaccgttatgccgctcaaccgttatgctttcaaccgttatgatctcaaccgttatacgctcaaccgtta

SEQ ID NO: 7021 - DNA, 146 bp, synthetic construct
  source 1..146: mol_type = other DNA
taacggttgtacgcttaacggttgtgccgcttaacggttgtgcttttaacggttgtgatcttaacggttgtacgcttaacggttgtgccgcttaacggttgtgcttttaacggttgtgatcttaacggttgtacgcttaacggttg

SEQ ID NO: 7022 - DNA, 146 bp, synthetic construct
  source 1..146: mol_type = other DNA
caaccgttctacgctcaaccgttctgccgctcaaccgttctgctttcaaccgttctgatctcaaccgttctacgctcaaccgttctgccgctcaaccgttctgctttcaaccgttctgatctcaaccgttctacgctcaaccgttc

SEQ ID NO: 7023 - DNA, 146 bp, synthetic construct
  source 1..146: mol_type = other DNA
gaacggttgtacgctgaacggttgtgccgctgaacggttgtgctttgaacggttgtgatctgaacggttgtacgctgaacggttgtgccgctgaacggttgtgctttgaacggttgtgatctgaacggttgtacgctgaacggttg

SEQ ID NO: 7024 - DNA, 146 bp, synthetic construct
  source 1..146: mol_type = other DNA
caaccgttgtacgctcaaccgttgtgccgctcaaccgttgtgctttcaaccgttgtgatctcaaccgttgtacgctcaaccgttgtgccgctcaaccgttgtgctttcaaccgttgtgatctcaaccgttgtacgctcaaccgttg

SEQ ID NO: 7025 - DNA, 146 bp, synthetic construct
  source 1..146: mol_type = other DNA
caacggttgtacgctcaacggttgtgccgctcaacggttgtgctttcaacggttgtgatctcaacggttgtacgctcaacggttgtgccgctcaacggttgtgctttcaacggttgtgatctcaacggttgtacgctcaacggttg

SEQ ID NO: 7026 - DNA, 146 bp, synthetic construct
  source 1..146: mol_type = other DNA
caacggccatacgctcaacggccatgccgctcaacggccatgctttcaacggccatgatctcaacggccatacgctcaacggccatgccgctcaacggccatgctttcaacggccatgatctcaacggccatacgctcaacggcca

SEQ ID NO: 7027 - DNA, 146 bp, synthetic construct
  source 1..146: mol_type = other DNA
tggccgttgtacgcttggccgttgtgccgcttggccgttgtgcttttggccgttgtgatcttggccgttgtacgcttggccgttgtgccgcttggccgttgtgcttttggccgttgtgatcttggccgttgtacgcttggccgttg

SEQ ID NO: 7028 - DNA, 146 bp, synthetic construct
  source 1..146: mol_type = other DNA
caacggccctacgctcaacggccctgccgctcaacggccctgctttcaacggccctgatctcaacggccctacgctcaacggccctgccgctcaacggccctgctttcaacggccctgatctcaacggccctacgctcaacggccc

SEQ ID NO: 7029 - DNA, 146 bp, synthetic construct
  source 1..146: mol_type = other DNA
gggccgttgtacgctgggccgttgtgccgctgggccgttgtgctttgggccgttgtgatctgggccgttgtacgctgggccgttgtgccgctgggccgttgtgctttgggccgttgtgatctgggccgttgtacgctgggccgttg

SEQ ID NO: 7030 - DNA, 146 bp, synthetic construct
  source 1..146: mol_type = other DNA
caacggccgtacgctcaacggccgtgccgctcaacggccgtgctttcaacggccgtgatctcaacggccgtacgctcaacggccgtgccgctcaacggccgtgctttcaacggccgtgatctcaacggccgtacgctcaacggccg

SEQ ID NO: 7031 - DNA, 146 bp, synthetic construct
  source 1..146: mol_type = other DNA
cggccgttgtacgctcggccgttgtgccgctcggccgttgtgctttcggccgttgtgatctcggccgttgtacgctcggccgttgtgccgctcggccgttgtgctttcggccgttgtgatctcggccgttgtacgctcggccgttg

SEQ ID NO: 7032 - DNA, 146 bp, synthetic construct
  source 1..146: mol_type = other DNA
caacggctatacgctcaacggctatgccgctcaacggctatgctttcaacggctatgatctcaacggctatacgctcaacggctatgccgctcaacggctatgctttcaacggctatgatctcaacggctatacgctcaacggcta

SEQ ID NO: 7033 - DNA, 146 bp, synthetic construct
  source 1..146: mol_type = other DNA
tagccgttgtacgcttagccgttgtgccgcttagccgttgtgcttttagccgttgtgatcttagccgttgtacgcttagccgttgtgccgcttagccgttgtgcttttagccgttgtgatcttagccgttgtacgcttagccgttg

SEQ ID NO: 7034 - DNA, 146 bp, synthetic construct
  source 1..146: mol_type = other DNA
caacggctctacgctcaacggctctgccgctcaacggctctgctttcaacggctctgatctcaacggctctacgctcaacggctctgccgctcaacggctctgctttcaacggctctgatctcaacggctctacgctcaacggctc

SEQ ID NO: 7035 - DNA, 146 bp, synthetic construct
  source 1..146: mol_type = other DNA
gagccgttgtacgctgagccgttgtgccgctgagccgttgtgctttgagccgttgtgatctgagccgttgtacgctgagccgttgtgccgctgagccgttgtgctttgagccgttgtgatctgagccgttgtacgctgagccgttg

SEQ ID NO: 7036 - DNA, 146 bp, synthetic construct
  source 1..146: mol_type = other DNA
caacggctgtacgctcaacggctgtgccgctcaacggctgtgctttcaacggctgtgatctcaacggctgtacgctcaacggctgtgccgctcaacggctgtgctttcaacggctgtgatctcaacggctgtacgctcaacggctg

SEQ ID NO: 7037 - DNA, 146 bp, synthetic construct
  source 1..146: mol_type = other DNA
cagccgttgtacgctcagccgttgtgccgctcagccgttgtgctttcagccgttgtgatctcagccgttgtacgctcagccgttgtgccgctcagccgttgtgctttcagccgttgtgatctcagccgttgtacgctcagccgttg

SEQ ID NO: 7038 - DNA, 146 bp, synthetic construct
  source 1..146: mol_type = other DNA
caacggtcatacgctcaacggtcatgccgctcaacggtcatgctttcaacggtcatgatctcaacggtcatacgctcaacggtcatgccgctcaacggtcatgctttcaacggtcatgatctcaacggtcatacgctcaacggtca

SEQ ID NO: 7039 - DNA, 146 bp, synthetic construct
  source 1..146: mol_type = other DNA
tgaccgttgtacgcttgaccgttgtgccgcttgaccgttgtgcttttgaccgttgtgatcttgaccgttgtacgcttgaccgttgtgccgcttgaccgttgtgcttttgaccgttgtgatcttgaccgttgtacgcttgaccgttg

SEQ ID NO: 7040 - DNA, 146 bp, synthetic construct
  source 1..146: mol_type = other DNA
caacggtcctacgctcaacggtcctgccgctcaacggtcctgctttcaacggtcctgatctcaacggtcctacgctcaacggtcctgccgctcaacggtcctgctttcaacggtcctgatctcaacggtcctacgctcaacggtcc

SEQ ID NO: 7041 - DNA, 146 bp, synthetic construct
  source 1..146: mol_type = other DNA
ggaccgttgtacgctggaccgttgtgccgctggaccgttgtgctttggaccgttgtgatctggaccgttgtacgctggaccgttgtgccgctggaccgttgtgctttggaccgttgtgatctggaccgttgtacgctggaccgttg

SEQ ID NO: 7042 - DNA, 146 bp, synthetic construct
  source 1..146: mol_type = other DNA
caacggtcgtacgctcaacggtcgtgccgctcaacggtcgtgctttcaacggtcgtgatctcaacggtcgtacgctcaacggtcgtgccgctcaacggtcgtgctttcaacggtcgtgatctcaacggtcgtacgctcaacggtcg

SEQ ID NO: 7043 - DNA, 146 bp, synthetic construct
  source 1..146: mol_type = other DNA
cgaccgttgtacgctcgaccgttgtgccgctcgaccgttgtgctttcgaccgttgtgatctcgaccgttgtacgctcgaccgttgtgccgctcgaccgttgtgctttcgaccgttgtgatctcgaccgttgtacgctcgaccgttg

SEQ ID NO: 7044 - DNA, 146 bp, synthetic construct
  source 1..146: mol_type = other DNA
caacggttatacgctcaacggttatgccgctcaacggttatgctttcaacggttatgatctcaacggttatacgctcaacggttatgccgctcaacggttatgctttcaacggttatgatctcaacggttatacgctcaacggtta

SEQ ID NO: 7045 - DNA, 146 bp, synthetic construct
  source 1..146: mol_type = other DNA
taaccgttgtacgcttaaccgttgtgccgcttaaccgttgtgcttttaaccgttgtgatcttaaccgttgtacgcttaaccgttgtgccgcttaaccgttgtgcttttaaccgttgtgatcttaaccgttgtacgcttaaccgttg

SEQ ID NO: 7046 - DNA, 146 bp, synthetic construct
  source 1..146: mol_type = other DNA
caacggttctacgctcaacggttctgccgctcaacggttctgctttcaacggttctgatctcaacggttctacgctcaacggttctgccgctcaacggttctgctttcaacggttctgatctcaacggttctacgctcaacggttc

SEQ ID NO: 7047 - DNA, 146 bp, synthetic construct
  source 1..146: mol_type = other DNA
gaaccgttgtacgctgaaccgttgtgccgctgaaccgttgtgctttgaaccgttgtgatctgaaccgttgtacgctgaaccgttgtgccgctgaaccgttgtgctttgaaccgttgtgatctgaaccgttgtacgctgaaccgttg

SEQ ID NO: 7048 - DNA, 146 bp, synthetic construct; identical to SEQ ID NO: 7025
  source 1..146: mol_type = other DNA

SEQ ID NO: 7049 - DNA, 146 bp, synthetic construct; identical to SEQ ID NO: 7024
  source 1..146: mol_type = other DNA

SEQ ID NO: 7050 - DNA, 146 bp, synthetic construct
  source 1..146: mol_type = other DNA
caactgccatacgctcaactgccatgccgctcaactgccatgctttcaactgccatgatctcaactgccatacgctcaactgccatgccgctcaactgccatgctttcaactgccatgatctcaactgccatacgctcaactgcca

SEQ ID NO: 7051 - DNA, 146 bp, synthetic construct
  source 1..146: mol_type = other DNA
tggcagttgtacgcttggcagttgtgccgcttggcagttgtgcttttggcagttgtgatcttggcagttgtacgcttggcagttgtgccgcttggcagttgtgcttttggcagttgtgatcttggcagttgtacgcttggcagttg

SEQ ID NO: 7052 - DNA, 146 bp, synthetic construct
  source 1..146: mol_type = other DNA
caactgccctacgctcaactgccctgccgctcaactgccctgctttcaactgccctgatctcaactgccctacgctcaactgccctgccgctcaactgccctgctttcaactgccctgatctcaactgccctacgctcaactgccc

SEQ ID NO: 7053 - DNA, 146 bp, synthetic construct
  source 1..146: mol_type = other DNA
gggcagttgtacgctgggcagttgtgccgctgggcagttgtgctttgggcagttgtgatctgggcagttgtacgctgggcagttgtgccgctgggcagttgtgctttgggcagttgtgatctgggcagttgtacgctgggcagttg

SEQ ID NO: 7054 - DNA, 146 bp, synthetic construct
  source 1..146: mol_type = other DNA
caactgccgtacgctcaactgccgtgccgctcaactgccgtgctttcaactgccgtgatctcaactgccgtacgctcaactgccgtgccgctcaactgccgtgctttcaactgccgtgatctcaactgccgtacgctcaactgccg

SEQ ID NO: 7055 - DNA, 146 bp, synthetic construct
  source 1..146: mol_type = other DNA
cggcagttgtacgctcggcagttgtgccgctcggcagttgtgctttcggcagttgtgatctcggcagttgtacgctcggcagttgtgccgctcggcagttgtgctttcggcagttgtgatctcggcagttgtacgctcggcagttg

SEQ ID NO: 7056 - DNA, 146 bp, synthetic construct
  source 1..146: mol_type = other DNA
caactgctatacgctcaactgctatgccgctcaactgctatgctttcaactgctatgatctcaactgctatacgctcaactgctatgccgctcaactgctatgctttcaactgctatgatctcaactgctatacgctcaactgcta

SEQ ID NO: 7057 - DNA, 146 bp, synthetic construct
  source 1..146: mol_type = other DNA
tagcagttgtacgcttagcagttgtgccgcttagcagttgtgcttttagcagttgtgatcttagcagttgtacgcttagcagttgtgccgcttagcagttgtgcttttagcagttgtgatcttagcagttgtacgcttagcagttg

SEQ ID NO: 7058 - DNA, 146 bp, synthetic construct
  source 1..146: mol_type = other DNA
caactgctctacgctcaactgctctgccgctcaactgctctgctttcaactgctctgatctcaactgctctacgctcaactgctctgccgctcaactgctctgctttcaactgctctgatctcaactgctctacgctcaactgctc

SEQ ID NO: 7059 - DNA, 146 bp, synthetic construct
  source 1..146: mol_type = other DNA
gagcagttgtacgctgagcagttgtgccgctgagcagttgtgctttgagcagttgtgatctgagcagttgtacgctgagcagttgtgccgctgagcagttgtgctttgagcagttgtgatctgagcagttgtacgctgagcagttg

SEQ ID NO: 7060 - DNA, 146 bp, synthetic construct
  source 1..146: mol_type = other DNA
caactgctgtacgctcaactgctgtgccgctcaactgctgtgctttcaactgctgtgatctcaactgctgtacgctcaactgctgtgccgctcaactgctgtgctttcaactgctgtgatctcaactgctgtacgctcaactgctg

SEQ ID NO: 7061 - DNA, 146 bp, synthetic construct
  source 1..146: mol_type = other DNA
cagcagttgtacgctcagcagttgtgccgctcagcagttgtgctttcagcagttgtgatctcagcagttgtacgctcagcagttgtgccgctcagcagttgtgctttcagcagttgtgatctcagcagttgtacgctcagcagttg

SEQ ID NO: 7062 - DNA, 146 bp, synthetic construct
  source 1..146: mol_type = other DNA
caactgtcatacgctcaactgtcatgccgctcaactgtcatgctttcaactgtcatgatctcaactgtcatacgctcaactgtcatgccgctcaactgtcatgctttcaactgtcatgatctcaactgtcatacgctcaactgtca

SEQ ID NO: 7063 - DNA, 146 bp, synthetic construct
  source 1..146: mol_type = other DNA
tgacagttgtacgcttgacagttgtgccgcttgacagttgtgcttttgacagttgtgatcttgacagttgtacgcttgacagttgtgccgcttgacagttgtgcttttgacagttgtgatcttgacagttgtacgcttgacagttg

SEQ ID NO: 7064 - DNA, 146 bp, synthetic construct
  source 1..146: mol_type = other DNA
caactgtcctacgctcaactgtcctgccgctcaactgtcctgctttcaactgtcctgatctcaactgtcctacgctcaactgtcctgccgctcaactgtcctgctttcaactgtcctgatctcaactgtcctacgctcaactgtcc

SEQ ID NO: 7065 - DNA, 146 bp, synthetic construct
  source 1..146: mol_type = other DNA
ggacagttgtacgctggacagttgtgccgctggacagttgtgctttggacagttgtgatctggacagttgtacgctggacagttgtgccgctggacagttgtgctttggacagttgtgatctggacagttgtacgctggacagttg

SEQ ID NO: 7066 - DNA, 146 bp, synthetic construct
  source 1..146: mol_type = other DNA
caactgtcgtacgctcaactgtcgtgccgctcaactgtcgtgctttcaactgtcgtgatctcaactgtcgtacgctcaactgtcgtgccgctcaactgtcgtgctttcaactgtcgtgatctcaactgtcgtacgctcaactgtcg

SEQ ID NO: 7067 - DNA, 146 bp, synthetic construct
  source 1..146: mol_type = other DNA
cgacagttgtacgctcgacagttgtgccgctcgacagttgtgctttcgacagttgtgatctcgacagttgtacgctcgacagttgtgccgctcgacagttgtgctttcgacagttgtgatctcgacagttgtacgctcgacagttg

SEQ ID NO: 7068 - DNA, 146 bp, synthetic construct
  source 1..146: mol_type = other DNA
caactgttatacgctcaactgttatgccgctcaactgttatgctttcaactgttatgatctcaactgttatacgctcaactgttatgccgctcaactgttatgctttcaactgttatgatctcaactgttatacgctcaactgtta

SEQ ID NO: 7069 - DNA, 146 bp, synthetic construct
  source 1..146: mol_type = other DNA
taacagttgtacgcttaacagttgtgccgcttaacagttgtgcttttaacagttgtgatcttaacagttgtacgcttaacagttgtgccgcttaacagttgtgcttttaacagttgtgatcttaacagttgtacgcttaacagttg

SEQ ID NO: 7070 - DNA, 146 bp, synthetic construct
  source 1..146: mol_type = other DNA
caactgttctacgctcaactgttctgccgctcaactgttctgctttcaactgttctgatctcaactgttctacgctcaactgttctgccgctcaactgttctgctttcaactgttctgatctcaactgttctacgctcaactgttc

SEQ ID NO: 7071 - DNA, 146 bp, synthetic construct
  source 1..146: mol_type = other DNA
gaacagttgtacgctgaacagttgtgccgctgaacagttgtgctttgaacagttgtgatctgaacagttgtacgctgaacagttgtgccgctgaacagttgtgctttgaacagttgtgatctgaacagttgtacgctgaacagttg

SEQ ID NO: 7072 - DNA, 146 bp, synthetic construct
  source 1..146: mol_type = other DNA
caactgttgtacgctcaactgttgtgccgctcaactgttgtgctttcaactgttgtgatctcaactgttgtacgctcaactgttgtgccgctcaactgttgtgctttcaactgttgtgatctcaactgttgtacgctcaactgttg

SEQ ID NO: 7073 - DNA, 146 bp, synthetic construct
  source 1..146: mol_type = other DNA
caacagttgtacgctcaacagttgtgccgctcaacagttgtgctttcaacagttgtgatctcaacagttgtacgctcaacagttgtgccgctcaacagttgtgctttcaacagttgtgatctcaacagttgtacgctcaacagttg

SEQ ID NO: 7074 - DNA, 146 bp, synthetic construct
  source 1..146: mol_type = other DNA
taaccgccatacgcttaaccgccatgccgcttaaccgccatgcttttaaccgccatgatcttaaccgccatacgcttaaccgccatgccgcttaaccgccatgcttttaaccgccatgatcttaaccgccatacgcttaaccgcca

SEQ ID NO: 7075 - DNA, 146 bp, synthetic construct
  source 1..146: mol_type = other DNA
tggcggttatacgcttggcggttatgccgcttggcggttatgcttttggcggttatgatcttggcggttatacgcttggcggttatgccgcttggcggttatgcttttggcggttatgatcttggcggttatacgcttggcggtta

SEQ ID NO: 7076 - DNA, 146 bp, synthetic construct
  source 1..146: mol_type = other DNA
taaccgccctacgcttaaccgccctgccgcttaaccgccctgcttttaaccgccctgatcttaaccgccctacgcttaaccgccctgccgcttaaccgccctgcttttaaccgccctgatcttaaccgccctacgcttaaccgccc

SEQ ID NO: 7077 - DNA, 146 bp, synthetic construct
  source 1..146: mol_type = other DNA
gggcggttatacgctgggcggttatgccgctgggcggttatgctttgggcggttatgatctgggcggttatacgctgggcggttatgccgctgggcggttatgctttgggcggttatgatctgggcggttatacgctgggcggtta

SEQ ID NO: 7078 - DNA, 146 bp, synthetic construct
  source 1..146: mol_type = other DNA
taaccgccgtacgcttaaccgccgtgccgcttaaccgccgtgcttttaaccgccgtgatcttaaccgccgtacgcttaaccgccgtgccgcttaaccgccgtgcttttaaccgccgtgatcttaaccgccgtacgcttaaccgccg

SEQ ID NO: 7079 - DNA, 146 bp, synthetic construct
  source 1..146: mol_type = other DNA
cggcggttatacgctcggcggttatgccgctcggcggttatgctttcggcggttatgatctcggcggttatacgctcggcggttatgccgctcggcggttatgctttcggcggttatgatctcggcggttatacgctcggcggtta

SEQ ID NO: 7080 - DNA, 146 bp, synthetic construct
  source 1..146: mol_type = other DNA
taaccgctatacgcttaaccgctatgccgcttaaccgctatgcttttaaccgctatgatcttaaccgctatacgcttaaccgctatgccgcttaaccgctatgcttttaaccgctatgatcttaaccgctatacgcttaaccgcta

SEQ ID NO: 7081 - DNA, 146 bp, synthetic construct
  source 1..146: mol_type = other DNA
tagcggttatacgcttagcggttatgccgcttagcggttatgcttttagcggttatgatcttagcggttatacgcttagcggttatgccgcttagcggttatgcttttagcggttatgatcttagcggttatacgcttagcggtta

SEQ ID NO: 7082 - DNA, 146 bp, synthetic construct
  source 1..146: mol_type = other DNA
taaccgctctacgcttaaccgctctgccgcttaaccgctctgcttttaaccgctctgatcttaaccgctctacgcttaaccgctctgccgcttaaccgctctgcttttaaccgctctgatcttaaccgctctacgcttaaccgctc

SEQ ID NO: 7083 - DNA, 146 bp, synthetic construct
  source 1..146: mol_type = other DNA
gagcggttatacgctgagcggttatgccgctgagcggttatgctttgagcggttatgatctgagcggttatacgctgagcggttatgccgctgagcggttatgctttgagcggttatgatctgagcggttatacgctgagcggtta

SEQ ID NO: 7084 - DNA, 146 bp, synthetic construct
  source 1..146: mol_type = other DNA
taaccgctgtacgcttaaccgctgtgccgcttaaccgctgtgcttttaaccgctgtgatcttaaccgctgtacgcttaaccgctgtgccgcttaaccgctgtgcttttaaccgctgtgatcttaaccgctgtacgcttaaccgctg

SEQ ID NO: 7085 - DNA, 146 bp, synthetic construct
  source 1..146: mol_type = other DNA
cagcggttatacgctcagcggttatgccgctcagcggttatgctttcagcggttatgatctcagcggttatacgctcagcggttatgccgctcagcggttatgctttcagcggttatgatctcagcggttatacgctcagcggtta

SEQ ID NO: 7086 - DNA, 146 bp, synthetic construct
  source 1..146: mol_type = other DNA
taaccgtcatacgcttaaccgtcatgccgcttaaccgtcatgcttttaaccgtcatgatcttaaccgtcatacgcttaaccgtcatgccgcttaaccgtcatgcttttaaccgtcatgatcttaaccgtcatacgcttaaccgtca

SEQ ID NO: 7087 - DNA, 146 bp, synthetic construct
  source 1..146: mol_type = other DNA
tgacggttatacgcttgacggttatgccgcttgacggttatgcttttgacggttatgatcttgacggttatacgcttgacggttatgccgcttgacggttatgcttttgacggttatgatcttgacggttatacgcttgacggtta

SEQ ID NO: 7088 - DNA, 146 bp, synthetic construct
  source 1..146: mol_type = other DNA
taaccgtcctacgcttaaccgtcctgccgcttaaccgtcctgcttttaaccgtcctgatcttaaccgtcctacgcttaaccgtcctgccgcttaaccgtcctgcttttaaccgtcctgatcttaaccgtcctacgcttaaccgtcc

SEQ ID NO: 7089 - DNA, 146 bp, synthetic construct
  source 1..146: mol_type = other DNA
ggacggttatacgctggacggttatgccgctggacggttatgctttggacggttatgatctggacggttatacgctggacggttatgccgctggacggttatgctttggacggttatgatctggacggttatacgctggacggtta

SEQ ID NO: 7090 - DNA, 146 bp, synthetic construct
  source 1..146: mol_type = other DNA
taaccgtcgtacgcttaaccgtcgtgccgcttaaccgtcgtgcttttaaccgtcgtgatcttaaccgtcgtacgcttaaccgtcgtgccgcttaaccgtcgtgcttttaaccgtcgtgatcttaaccgtcgtacgcttaaccgtcg

SEQ ID NO: 7091 - DNA, 146 bp, synthetic construct
  source 1..146: mol_type = other DNA
cgacggttatacgctcgacggttatgccgctcgacggttatgctttcgacggttatgatctcgacggttatacgctcgacggttatgccgctcgacggttatgctttcgacggttatgatctcgacggttatacgctcgacggtta

SEQ ID NO: 7092 - DNA, 146 bp, synthetic construct
  source 1..146: mol_type = other DNA
taaccgttatacgcttaaccgttatgccgcttaaccgttatgcttttaaccgttatgatcttaaccgttatacgcttaaccgttatgccgcttaaccgttatgcttttaaccgttatgatcttaaccgttatacgcttaaccgtta

SEQ ID NO: 7093 - DNA, 146 bp, synthetic construct
  source 1..146: mol_type = other DNA
taacggttatacgcttaacggttatgccgcttaacggttatgcttttaacggttatgatcttaacggttatacgcttaacggttatgccgcttaacggttatgcttttaacggttatgatcttaacggttatacgcttaacggtta

SEQ ID NO: 7094 - DNA, 146 bp, synthetic construct
  source 1..146: mol_type = other DNA
taaccgttctacgcttaaccgttctgccgcttaaccgttctgcttttaaccgttctgatcttaaccgttctacgcttaaccgttctgccgcttaaccgttctgcttttaaccgttctgatcttaaccgttctacgcttaaccgttc

SEQ ID NO: 7095 - DNA, 146 bp, synthetic construct
  source 1..146: mol_type = other DNA
gaacggttatacgctgaacggttatgccgctgaacggttatgctttgaacggttatgatctgaacggttatacgctgaacggttatgccgctgaacggttatgctttgaacggttatgatctgaacggttatacgctgaacggtta

SEQ ID NO: 7096 - DNA, 146 bp, synthetic construct; identical to SEQ ID NO: 7045
  source 1..146: mol_type = other DNA

SEQ ID NO: 7097 - DNA, 146 bp, synthetic construct; identical to SEQ ID NO: 7044
  source 1..146: mol_type = other DNA

SEQ ID NO: 7098 - DNA, 146 bp, synthetic construct
  source 1..146: mol_type = other DNA
taacggccatacgcttaacggccatgccgcttaacggccatgcttttaacggccatgatcttaacggccatacgcttaacggccatgccgcttaacggccatgcttttaacggccatgatcttaacggccatacgcttaacggcca

SEQ ID NO: 7099 - DNA, 146 bp, synthetic construct
  source 1..146: mol_type = other DNA
tggccgttatacgcttggccgttatgccgcttggccgttatgcttttggccgttatgatcttggccgttatacgcttggccgttatgccgcttggccgttatgcttttggccgttatgatcttggccgttatacgcttggccgtta

SEQ ID NO: 7100 - DNA, 146 bp, synthetic construct
  source 1..146: mol_type = other DNA
taacggccctacgcttaacggccctgccgcttaacggccctgcttttaacggccctgatcttaacggccctacgcttaacggccctgccgcttaacggccctgcttttaacggccctgatcttaacggccctacgcttaacggccc

SEQ ID NO: 7101 - DNA, 146 bp, synthetic construct
  source 1..146: mol_type = other DNA
gggccgttatacgctgggccgttatgccgctgggccgttatgctttgggccgttatgatctgggccgttatacgctgggccgttatgccgctgggccgttatgctttgggccgttatgatctgggccgttatacgctgggccgtta

SEQ ID NO: 7102 - DNA, 146 bp, synthetic construct
  source 1..146: mol_type = other DNA
taacggccgtacgcttaacggccgtgccgcttaacggccgtgcttttaacggccgtgatcttaacggccgtacgcttaacggccgtgccgcttaacggccgtgcttttaacggccgtgatcttaacggccgtacgcttaacggccg

SEQ ID NO: 7103 - DNA, 146 bp, synthetic construct
  source 1..146: mol_type = other DNA
cggccgttatacgctcggccgttatgccgctcggccgttatgctttcggccgttatgatctcggccgttatacgctcggccgttatgccgctcggccgttatgctttcggccgttatgatctcggccgttatacgctcggccgtta

SEQ ID NO: 7104 - DNA, 146 bp, synthetic construct
  source 1..146: mol_type = other DNA
taacggctatacgcttaacggctatgccgcttaacggctatgcttttaacggctatgatcttaacggctatacgcttaacggctatgccgcttaacggctatgcttttaacggctatgatcttaacggctatacgcttaacggcta

SEQ ID NO: 7105 - DNA, 146 bp, synthetic construct
  source 1..146: mol_type = other DNA
tagccgttatacgcttagccgttatgccgcttagccgttatgcttttagccgttatgatcttagccgttatacgcttagccgttatgccgcttagccgttatgcttttagccgttatgatcttagccgttatacgcttagccgtta

SEQ ID NO: 7106 - DNA, 146 bp, synthetic construct
  source 1..146: mol_type = other DNA
taacggctctacgcttaacggctctgccgcttaacggctctgcttttaacggctctgatcttaacggctctacgcttaacggctctgccgcttaacggctctgcttttaacggctctgatcttaacggctctacgcttaacggctc

SEQ ID NO: 7107 - DNA, 146 bp, synthetic construct
  source 1..146: mol_type = other DNA
gagccgttatacgctgagccgttatgccgctgagccgttatgctttgagccgttatgatctgagccgttatacgctgagccgttatgccgctgagccgttatgctttgagccgttatgatctgagccgttatacgctgagccgtta

SEQ ID NO: 7108 - DNA, 146 bp, synthetic construct
  source 1..146: mol_type = other DNA
taacggctgtacgcttaacggctgtgccgcttaacggctgtgcttttaacggctgtgatcttaacggctgtacgcttaacggctgtgccgcttaacggctgtgcttttaacggctgtgatcttaacggctgtacgcttaacggctg

SEQ ID NO: 7109 - DNA, 146 bp, synthetic construct
  source 1..146: mol_type = other DNA
cagccgttatacgctcagccgttatgccgctcagccgttatgctttcagccgttatgatctcagccgttatacgctcagccgttatgccgctcagccgttatgctttcagccgttatgatctcagccgttatacgctcagccgtta

SEQ ID NO: 7110 - DNA, 146 bp, synthetic construct
  source 1..146: mol_type = other DNA
taacggtcatacgcttaacggtcatgccgcttaacggtcatgcttttaacggtcatgatcttaacggtcatacgcttaacggtcatgccgcttaacggtcatgcttttaacggtcatgatcttaacggtcatacgcttaacggtca

SEQ ID NO: 7111 - DNA, 146 bp, synthetic construct
  source 1..146: mol_type = other DNA
tgaccgttatacgcttgaccgttatgccgcttgaccgttatgcttttgaccgttatgatcttgaccgttatacgcttgaccgttatgccgcttgaccgttatgcttttgaccgttatgatcttgaccgttatacgcttgaccgtta

SEQ ID NO: 7112 - DNA, 146 bp, synthetic construct
  source 1..146: mol_type = other DNA
taacggtcctacgcttaacggtcctgccgcttaacggtcctgcttttaacggtcctgatcttaacggtcctacgcttaacggtcctgccgcttaacggtcctgcttttaacggtcctgatcttaacggtcctacgcttaacggtcc

SEQ ID NO: 7113 - DNA, 146 bp, synthetic construct
  source 1..146: mol_type = other DNA
ggaccgttatacgctggaccgttatgccgctggaccgttatgctttggaccgttatgatctggaccgttatacgctggaccgttatgccgctggaccgttatgctttggaccgttatgatctggaccgttatacgctggaccgtta

SEQ ID NO: 7114 - DNA, 146 bp, synthetic construct
  source 1..146: mol_type = other DNA
taacggtcgtacgcttaacggtcgtgccgcttaacggtcgtgcttttaacggtcgtgatcttaacggtcgtacgcttaacggtcgtgccgcttaacggtcgtgcttttaacggtcgtgatcttaacggtcgtacgcttaacggtcg

SEQ ID NO: 7115 - DNA, 146 bp, synthetic construct
  source 1..146: mol_type = other DNA
cgaccgttatacgctcgaccgttatgccgctcgaccgttatgctttcgaccgttatgatctcgaccgttatacgctcgaccgttatgccgctcgaccgttatgctttcgaccgttatgatctcgaccgttatacgctcgaccgtta

SEQ ID NO: 7116 - DNA, 146 bp, synthetic construct; identical to SEQ ID NO: 7093
  source 1..146: mol_type = other DNA

SEQ ID NO: 7117 - DNA, 146 bp, synthetic construct; identical to SEQ ID NO: 7092
  source 1..146: mol_type = other DNA

SEQ ID NO: 7118 - DNA, 146 bp, synthetic construct
  source 1..146: mol_type = other DNA
taacggttctacgcttaacggttctgccgcttaacggttctgcttttaacggttctgatcttaacggttctacgcttaacggttctgccgcttaacggttctgcttttaacggttctgatcttaacggttctacgcttaacggttc

SEQ ID NO: 7119 - DNA, 146 bp, synthetic construct
  source 1..146: mol_type = other DNA
gaaccgttatacgctgaaccgttatgccgctgaaccgttatgctttgaaccgttatgatctgaaccgttatacgctgaaccgttatgccgctgaaccgttatgctttgaaccgttatgatctgaaccgttatacgctgaaccgtta

SEQ ID NO: 7120 - DNA, 146 bp, synthetic construct; identical to SEQ ID NO: 7021
  source 1..146: mol_type = other DNA

SEQ ID NO: 7121 - DNA, 146 bp, synthetic construct; identical to SEQ ID NO: 7020
  source 1..146: mol_type = other DNA

SEQ ID NO: 7122 - DNA, 146 bp, synthetic construct
  source 1..146: mol_type = other DNA
taactgccatacgcttaactgccatgccgcttaactgccatgcttttaactgccatgatcttaactgccatacgcttaactgccatgccgcttaactgccatgcttttaactgccatgatcttaactgccatacgcttaactgcca

SEQ ID NO: 7123 - DNA, 146 bp, synthetic construct
  source 1..146: mol_type = other DNA
tggcagttatacgcttggcagttatgccgcttggcagttatgcttttggcagttatgatcttggcagttatacgcttggcagttatgccgcttggcagttatgcttttggcagttatgatcttggcagttatacgcttggcagtta

SEQ ID NO: 7124 - DNA, 146 bp, synthetic construct
  source 1..146: mol_type = other DNA
taactgccctacgcttaactgccctgccgcttaactgccctgcttttaactgccctgatcttaactgccctacgcttaactgccctgccgcttaactgccctgcttttaactgccctgatcttaactgccctacgcttaactgccc

SEQ ID NO: 7125 - DNA, 146 bp, synthetic construct
  source 1..146: mol_type = other DNA
gggcagttatacgctgggcagttatgccgctgggcagttatgctttgggcagttatgatctgggcagttatacgctgggcagttatgccgctgggcagttatgctttgggcagttatgatctgggcagttatacgctgggcagtta

SEQ ID NO: 7126 - DNA, 146 bp, synthetic construct
  source 1..146: mol_type = other DNA
taactgccgtacgcttaactgccgtgccgcttaactgccgtgcttttaactgccgtgatcttaactgccgtacgcttaactgccgtgccgcttaactgccgtgcttttaactgccgtgatcttaactgccgtacgcttaactgccg

SEQ ID NO: 7127 - DNA, 146 bp, synthetic construct
  source 1..146: mol_type = other DNA
cggcagttatacgctcggcagttatgccgctcggcagttatgctttcggcagttatgatctcggcagttatacgctcggcagttatgccgctcggcagttatgctttcggcagttatgatctcggcagttatacgctcggcagtta

SEQ ID NO: 7128 - DNA, 146 bp, synthetic construct
  source 1..146: mol_type = other DNA
taactgctatacgcttaactgctatgccgcttaactgctatgcttttaactgctatgatcttaactgctatacgcttaactgctatgccgcttaactgctatgcttttaactgctatgatcttaactgctatacgcttaactgcta

SEQ ID NO: 7129 - DNA, 146 bp, synthetic construct
  source 1..146: mol_type = other DNA
tagcagttatacgcttagcagttatgccgcttagcagttatgcttttagcagttatgatcttagcagttatacgcttagcagttatgccgcttagcagttatgcttttagcagttatgatcttagcagttatacgcttagcagtta

SEQ ID NO: 7130 - DNA, 146 bp, synthetic construct
  source 1..146: mol_type = other DNA
taactgctctacgcttaactgctctgccgcttaactgctctgcttttaactgctctgatcttaactgctctacgcttaactgctctgccgcttaactgctctgcttttaactgctctgatcttaactgctctacgcttaactgctc

SEQ ID NO: 7131 - DNA, 146 bp, synthetic construct
  source 1..146: mol_type = other DNA
gagcagttatacgctgagcagttatgccgctgagcagttatgctttgagcagttatgatctgagcagttatacgctgagcagttatgccgctgagcagttatgctttgagcagttatgatctgagcagttatacgctgagcagtta

SEQ ID NO: 7132 - DNA, 146 bp, synthetic construct
  source 1..146: mol_type = other DNA
taactgctgtacgcttaactgctgtgccgcttaactgctgtgcttttaactgctgtgatcttaactgctgtacgcttaactgctgtgccgcttaactgctgtgcttttaactgctgtgatcttaactgctgtacgcttaactgctg

SEQ ID NO: 7133 - DNA, 146 bp, synthetic construct
  source 1..146: mol_type = other DNA
cagcagttatacgctcagcagttatgccgctcagcagttatgctttcagcagttatgatctcagcagttatacgctcagcagttatgccgctcagcagttatgctttcagcagttatgatctcagcagttatacgctcagcagtta

SEQ ID NO: 7134 - DNA, 146 bp, synthetic construct
  source 1..146: mol_type = other DNA
taactgtcatacgcttaactgtcatgccgcttaactgtcatgcttttaactgtcatgatcttaactgtcatacgcttaactgtcatgccgcttaactgtcatgcttttaactgtcatgatcttaactgtcatacgcttaactgtca

SEQ ID NO: 7135 - DNA, 146 bp, synthetic construct
  source 1..146: mol_type = other DNA
tgacagttatacgcttgacagttatgccgcttgacagttatgcttttgacagttatgatcttgacagttatacgcttgacagttatgccgcttgacagttatgcttttgacagttatgatcttgacagttatacgcttgacagtta

SEQ ID NO: 7136 - DNA, 146 bp, synthetic construct
  source 1..146: mol_type = other DNA
taactgtcctacgcttaactgtcctgccgcttaactgtcctgcttttaactgtcctgatcttaactgtcctacgcttaactgtcctgccgcttaactgtcctgcttttaactgtcctgatcttaactgtcctacgcttaactgtcc

SEQ ID NO: 7137 - DNA, 146 bp, synthetic construct
  source 1..146: mol_type = other DNA
ggacagttatacgctggacagttatgccgctggacagttatgctttggacagttatgatctggacagttatacgctggacagttatgccgctggacagttatgctttggacagttatgatctggacagttatacgctggacagtta

SEQ ID NO: 7138 - DNA, 146 bp, synthetic construct
  source 1..146: mol_type = other DNA
taactgtcgtacgcttaactgtcgtgccgcttaactgtcgtgcttttaactgtcgtgatcttaactgtcgtacgcttaactgtcgtgccgcttaactgtcgtgcttttaactgtcgtgatcttaactgtcgtacgcttaactgtcg

SEQ ID NO: 7139 - DNA, 146 bp, synthetic construct
  source 1..146: mol_type = other DNA
cgacagttatacgctcgacagttatgccgctcgacagttatgctttcgacagttatgatctcgacagttatacgctcgacagttatgccgctcgacagttatgctttcgacagttatgatctcgacagttatacgctcgacagtta

SEQ ID NO: 7140 - DNA, 146 bp, synthetic construct
  source 1..146: mol_type = other DNA
taactgttatacgcttaactgttatgccgcttaactgttatgcttttaactgttatgatcttaactgttatacgcttaactgttatgccgcttaactgttatgcttttaactgttatgatcttaactgttatacgcttaactgtta

SEQ ID NO: 7141 - DNA, 146 bp, synthetic construct
  source 1..146: mol_type = other DNA
taacagttatacgcttaacagttatgccgcttaacagttatgcttttaacagttatgatcttaacagttatacgcttaacagttatgccgcttaacagttatgcttttaacagttatgatcttaacagttatacgcttaacagtta

SEQ ID NO: 7142 - DNA, 146 bp, synthetic construct
  source 1..146: mol_type = other DNA
taactgttctacgcttaactgttctgccgcttaactgttctgcttttaactgttctgatcttaactgttctacgcttaactgttctgccgcttaactgttctgcttttaactgttctgatcttaactgttctacgcttaactgttc

SEQ ID NO: 7143 - DNA, 146 bp, synthetic construct
  source 1..146: mol_type = other DNA
gaacagttatacgctgaacagttatgccgctgaacagttatgctttgaacagttatgatctgaacagttatacgctgaacagttatgccgctgaacagttatgctttgaacagttatgatctgaacagttatacgctgaacagtta

SEQ ID NO: 7144 - DNA, 146 bp, synthetic construct
  source 1..146: mol_type = other DNA
taactgttgtacgcttaactgttgtgccgcttaactgttgtgcttttaactgttgtgatcttaactgttgtacgcttaactgttgtgccgcttaactgttgtgcttttaactgttgtgatcttaactgttgtacgcttaactgttg

SEQ ID NO: 7145 - DNA, 146 bp, synthetic construct
  source 1..146: mol_type = other DNA
caacagttatacgctcaacagttatgccgctcaacagttatgctttcaacagttatgatctcaacagttatacgctcaacagttatgccgctcaacagttatgctttcaacagttatgatctcaacagttatacgctcaacagtta

SEQ ID NO: 7146 - DNA, 140 bp, synthetic construct
  source 1..140: mol_type = other DNA
tcaaggtcaatgccgcttcaaggtcaatgcttttcaaggtcaatgatcttcaaggtcaatacgcttcaaggtcaatgccgcttcaaggtcaatgcttttcaaggtcaatgatcttcaaggtcaatacgcttcaaggtcaa

SEQ ID NO: 7147 - DNA, 140 bp, synthetic construct
  source 1..140: mol_type = other DNA
ttgaccttgatgccgctttgaccttgatgctttttgaccttgatgatctttgaccttgatacgctttgaccttgatgccgctttgaccttgatgctttttgaccttgatgatctttgaccttgatacgctttgaccttga

SEQ ID NO: 7148 - DNA, 140 bp, synthetic construct
  source 1..140: mol_type = other DNA
tcaaggtcattgccgcttcaaggtcattgcttttcaaggtcattgatcttcaaggtcattacgcttcaaggtcattgccgcttcaaggtcattgcttttcaaggtcattgatcttcaaggtcattacgcttcaaggtcat

SEQ ID NO: 7149 - DNA, 140 bp, synthetic construct
  source 1..140: mol_type = other DNA
atgaccttgatgccgctatgaccttgatgctttatgaccttgatgatctatgaccttgatacgctatgaccttgatgccgctatgaccttgatgctttatgaccttgatgatctatgaccttgatacgctatgaccttga

SEQ ID NO: 7150 - DNA, 149 bp, synthetic construct
  source 1..149: mol_type = other DNA
cccgcgtcctttgccgctcccgcgtcctttgctttcccgcgtcctttgatctcccgcgtcctttacgctcccgcgtcctttgccgctcccgcgtcctttgctttcccgcgtcctttgatctcccgcgtcctttacgctcccgcgtcctt

SEQ ID NO: 7151 - DNA, 149 bp, synthetic construct
  source 1..149: mol_type = other DNA
aaggacgcgggtgccgctaaggacgcgggtgctttaaggacgcgggtgatctaaggacgcgggtacgctaaggacgcgggtgccgctaaggacgcgggtgctttaaggacgcgggtgatctaaggacgcgggtacgctaaggacgcggg

SEQ ID NO: 7152 - DNA, 149 bp, synthetic construct
  source 1..149: mol_type = other DNA
tccgcgtcctttgccgcttccgcgtcctttgcttttccgcgtcctttgatcttccgcgtcctttacgcttccgcgtcctttgccgcttccgcgtcctttgcttttccgcgtcctttgatcttccgcgtcctttacgcttccgcgtcctt

SEQ ID NO: 7153 - DNA, 149 bp, synthetic construct
  source 1..149: mol_type = other DNA
aaggacgcggatgccgctaaggacgcggatgctttaaggacgcggatgatctaaggacgcggatacgctaaggacgcggatgccgctaaggacgcggatgctttaaggacgcggatgatctaaggacgcggatacgctaaggacgcgga

SEQ ID NO: 7154 - DNA, 147 bp, synthetic construct
  source 1..147: mol_type = other DNA
agcacaaaggccatgctttagcacaaaggccatgatctagcacaaaggccatacgctagcacaaaggccatgccgctagcacaaaggccatgctttagcacaaaggccatgatctagcacaaaggccatacgctagcacaaaggcca

SEQ ID NO: 7155 - DNA, 147 bp, synthetic construct
  source 1..147: mol_type = other DNA
tggcctttgtgcttgcttttggcctttgtgcttgatcttggcctttgtgcttacgcttggcctttgtgcttgccgcttggcctttgtgcttgcttttggcctttgtgcttgatcttggcctttgtgcttacgcttggcctttgtgct

SEQ ID NO: 7156 - DNA, 147 bp, synthetic construct
  source 1..147: mol_type = other DNA
agcacaaaggtcatgctttagcacaaaggtcatgatctagcacaaaggtcatacgctagcacaaaggtcatgccgctagcacaaaggtcatgctttagcacaaaggtcatgatctagcacaaaggtcatacgctagcacaaaggtca

SEQ ID NO: 7157 - DNA, 147 bp, synthetic construct
  source 1..147: mol_type = other DNA
tgacctttgtgcttgcttttgacctttgtgcttgatcttgacctttgtgcttacgcttgacctttgtgcttgccgcttgacctttgtgcttgcttttgacctttgtgcttgatcttgacctttgtgcttacgcttgacctttgtgct

SEQ ID NO: 7158 - DNA, 147 bp, synthetic construct
  source 1..147: mol_type = other DNA
agcacaaagtccatgctttagcacaaagtccatgatctagcacaaagtccatacgctagcacaaagtccatgccgctagcacaaagtccatgctttagcacaaagtccatgatctagcacaaagtccatacgctagcacaaagtcca

SEQ ID NO: 7159 - DNA, 147 bp, synthetic construct
  source 1..147: mol_type = other DNA
tggactttgtgcttgcttttggactttgtgcttgatcttggactttgtgcttacgcttggactttgtgcttgccgcttggactttgtgcttgcttttggactttgtgcttgatcttggactttgtgcttacgcttggactttgtgct

SEQ ID NO: 7160 - DNA, 147 bp, synthetic construct
  source 1..147: mol_type = other DNA
agcacaaagttcatgctttagcacaaagttcatgatctagcacaaagttcatacgctagcacaaagttcatgccgctagcacaaagttcatgctttagcacaaagttcatgatctagcacaaagttcatacgctagcacaaagttca

SEQ ID NO: 7161 - DNA, 147 bp, synthetic construct
  source 1..147: mol_type = other DNA
tgaactttgtgcttgcttttgaactttgtgcttgatcttgaactttgtgcttacgcttgaactttgtgcttgccgcttgaactttgtgcttgcttttgaactttgtgcttgatcttgaactttgtgcttacgcttgaactttgtgct

SEQ ID NO: 7162 - DNA, 147 bp, synthetic construct
  source 1..147: mol_type = other DNA
ggcacaaaggccatgctttggcacaaaggccatgatctggcacaaaggccatacgctggcacaaaggccatgccgctggcacaaaggccatgctttggcacaaaggccatgatctggcacaaaggccatacgctggcacaaaggcca

SEQ ID NO: 7163 - DNA, 147 bp, synthetic construct
  source 1..147: mol_type = other DNA
tggcctttgtgcctgcttttggcctttgtgcctgatcttggcctttgtgcctacgcttggcctttgtgcctgccgcttggcctttgtgcctgcttttggcctttgtgcctgatcttggcctttgtgcctacgcttggcctttgtgcc

SEQ ID NO: 7164 - DNA, 147 bp, synthetic construct
  source 1..147: mol_type = other DNA
ggcacaaaggtcatgctttggcacaaaggtcatgatctggcacaaaggtcatacgctggcacaaaggtcatgccgctggcacaaaggtcatgctttggcacaaaggtcatgatctggcacaaaggtcatacgctggcacaaaggtca

SEQ ID NO: 7165 - DNA, 147 bp, synthetic construct
  source 1..147: mol_type = other DNA
tgacctttgtgcctgcttttgacctttgtgcctgatcttgacctttgtgcctacgcttgacctttgtgcctgccgcttgacctttgtgcctgcttttgacctttgtgcctgatcttgacctttgtgcctacgcttgacctttgtgcc

SEQ ID NO: 7166 - DNA, 147 bp, synthetic construct
  source 1..147: mol_type = other DNA
ggcacaaagtccatgctttggcacaaagtccatgatctggcacaaagtccatacgctggcacaaagtccatgccgctggcacaaagtccatgctttggcacaaagtccatgatctggcacaaagtccatacgctggcacaaagtcca

SEQ ID NO: 7167 - DNA, 147 bp, synthetic construct
  source 1..147: mol_type = other DNA
tggactttgtgcctgcttttggactttgtgcctgatcttggactttgtgcctacgcttggactttgtgcctgccgcttggactttgtgcctgcttttggactttgtgcctgatcttggactttgtgcctacgcttggactttgtgcc

SEQ ID NO: 7168 - DNA, 147 bp, synthetic construct
  source 1..147: mol_type = other DNA
ggcacaaagttcatgctttggcacaaagttcatgatctggcacaaagttcatacgctggcacaaagttcatgccgctggcacaaagttcatgctttggcacaaagttcatgatctggcacaaagttcatacgctggcacaaagttca

SEQ ID NO: 7169 - DNA, 147 bp, synthetic construct
  source 1..147: mol_type = other DNA
tgaactttgtgcctgcttttgaactttgtgcctgatcttgaactttgtgcctacgcttgaactttgtgcctgccgcttgaactttgtgcctgcttttgaactttgtgcctgatcttgaactttgtgcctacgcttgaactttgtgcc

SEQ ID NO: 7170 - DNA, 139 bp, synthetic construct; identical to SEQ ID NO: 6646
  source 1..139: mol_type = other DNA

SEQ ID NO: 7171 - DNA, 139 bp, synthetic construct; identical to SEQ ID NO: 6647
  source 1..139: mol_type = other DNA

SEQ ID NO: 7172 - DNA, 139 bp, synthetic construct
  source 1..139: mol_type = other DNA
actccactgatctactccactacgctactccactgccgctactccactgctttactccactgatctactccactacgctactccactgccgctactccactgctttactccactgatctactccactacgctactccac

SEQ ID NO: 7173 - DNA, 139 bp, synthetic construct
  source 1..139: mol_type = other DNA
gtggagttgatctgtggagttacgctgtggagttgccgctgtggagttgctttgtggagttgatctgtggagttacgctgtggagttgccgctgtggagttgctttgtggagttgatctgtggagttacgctgtggagt

SEQ ID NO: 7174 - DNA, 139 bp, synthetic construct
  source 1..139: mol_type = other DNA
acttcactgatctacttcactacgctacttcactgccgctacttcactgctttacttcactgatctacttcactacgctacttcactgccgctacttcactgctttacttcactgatctacttcactacgctacttcac

SEQ ID NO: 7175 - DNA, 139 bp, synthetic construct
  source 1..139: mol_type = other DNA
gtgaagttgatctgtgaagttacgctgtgaagttgccgctgtgaagttgctttgtgaagttgatctgtgaagttacgctgtgaagttgccgctgtgaagttgctttgtgaagttgatctgtgaagttacgctgtgaagt

SEQ ID NO: 7176 - DNA, 139 bp, synthetic construct
  source 1..139: mol_type = other DNA
atgccctgaggctgctttatgccctgaggctgatctatgccctgaggctacgctatgccctgaggctgccgctatgccctgaggctgctttatgccctgaggctgatctatgccctgaggctacgctatgccctgaggc

SEQ ID NO: 7177 - DNA, 139 bp, synthetic construct
  source 1..139: mol_type = other DNA
gcctcagggcattgctttgcctcagggcattgatctgcctcagggcattacgctgcctcagggcattgccgctgcctcagggcattgctttgcctcagggcattgatctgcctcagggcattacgctgcctcagggcat

SEQ ID NO: 7178 - DNA, 136 bp, synthetic construct
  source 1..136: mol_type = other DNA
tcaagtggtacgcttcaagtggtgccgcttcaagtggtgcttttcaagtggtgatcttcaagtggtacgcttcaagtggtgccgcttcaagtggtgcttttcaagtggtgatcttcaagtggtacgcttcaagtgg

SEQ ID NO: 7179 - DNA, 136 bp, synthetic construct
  source 1..136: mol_type = other DNA
ccacttgatacgctccacttgatgccgctccacttgatgctttccacttgatgatctccacttgatacgctccacttgatgccgctccacttgatgctttccacttgatgatctccacttgatacgctccacttga

SEQ ID NO: 7180 - DNA, 136 bp, synthetic construct
  source 1..136: mol_type = other DNA
ttaagtggtacgctttaagtggtgccgctttaagtggtgctttttaagtggtgatctttaagtggtacgctttaagtggtgccgctttaagtggtgctttttaagtggtgatctttaagtggtacgctttaagtgg

SEQ ID NO: 7181 - DNA, 136 bp, synthetic construct
  source 1..136: mol_type = other DNA
ccacttaatacgctccacttaatgccgctccacttaatgctttccacttaatgatctccacttaatacgctccacttaatgccgctccacttaatgctttccacttaatgatctccacttaatacgctccacttaa

SEQ ID NO: 7182 - DNA, 135 bp, synthetic construct
  source 1..135: mol_type = other DNA
cgccacctagtggctgatctcgccacctagtggctacgctcgccacctagtggctgccgctcgccacctagtggctgctttcgccacctagtggctgatctcgccacctagtggctacgctcgccacctagtggc

SEQ ID NO: 7183 - DNA, 135 bp, synthetic construct
  source 1..135: mol_type = other DNA
gccactaggtggcgtgatctgccactaggtggcgtacgctgccactaggtggcgtgccgctgccactaggtggcgtgctttgccactaggtggcgtgatctgccactaggtggcgtacgctgccactaggtggcg

SEQ ID NO: 7184 - DNA, 135 bp, synthetic construct
  source 1..135: mol_type = other DNA
cgccacctactggctgatctcgccacctactggctacgctcgccacctactggctgccgctcgccacctactggctgctttcgccacctactggctgatctcgccacctactggctacgctcgccacctactggc

SEQ ID NO: 7185 - DNA, 135 bp, synthetic construct
  source 1..135: mol_type = other DNA
gccagtaggtggcgtgatctgccagtaggtggcgtacgctgccagtaggtggcgtgccgctgccagtaggtggcgtgctttgccagtaggtggcgtgatctgccagtaggtggcgtacgctgccagtaggtggcg

SEQ ID NO: 7186 - DNA, 135 bp, synthetic construct
  source 1..135: mol_type = other DNA
cgccacctggtggctgatctcgccacctggtggctacgctcgccacctggtggctgccgctcgccacctggtggctgctttcgccacctggtggctgatctcgccacctggtggctacgctcgccacctggtggc

SEQ ID NO: 7187 - DNA, 135 bp, synthetic construct
  source 1..135: mol_type = other DNA
gccaccaggtggcgtgatctgccaccaggtggcgtacgctgccaccaggtggcgtgccgctgccaccaggtggcgtgctttgccaccaggtggcgtgatctgccaccaggtggcgtacgctgccaccaggtggcg

SEQ ID NO: 7188 - DNA, 135 bp, synthetic construct
  source 1..135: mol_type = other DNA
cgccacctgctggctgatctcgccacctgctggctacgctcgccacctgctggctgccgctcgccacctgctggctgctttcgccacctgctggctgatctcgccacctgctggctacgctcgccacctgctggc

SEQ ID NO: 7189 - DNA, 135 bp, synthetic construct
  source 1..135: mol_type = other DNA
gccagcaggtggcgtgatctgccagcaggtggcgtacgctgccagcaggtggcgtgccgctgccagcaggtggcgtgctttgccagcaggtggcgtgatctgccagcaggtggcgtacgctgccagcaggtggcg

SEQ ID NO: 7190 - DNA, 135 bp, synthetic construct
  source 1..135: mol_type = other DNA
cgccaccttgtggctgatctcgccaccttgtggctacgctcgccaccttgtggctgccgctcgccaccttgtggctgctttcgccaccttgtggctgatctcgccaccttgtggctacgctcgccaccttgtggc

SEQ ID NO: 7191 - DNA, 135 bp, synthetic construct
  source 1..135: mol_type = other DNA
gccacaaggtggcgtgatctgccacaaggtggcgtacgctgccacaaggtggcgtgccgctgccacaaggtggcgtgctttgccacaaggtggcgtgatctgccacaaggtggcgtacgctgccacaaggtggcg

SEQ ID NO: 7192 - DNA, 135 bp, synthetic construct
  source 1..135: mol_type = other DNA
cgccaccttctggctgatctcgccaccttctggctacgctcgccaccttctggctgccgctcgccaccttctggctgctttcgccaccttctggctgatctcgccaccttctggctacgctcgccaccttctggc

SEQ ID NO: 7193 - DNA, 135 bp, synthetic construct
  source 1..135: mol_type = other DNA
gccagaaggtggcgtgatctgccagaaggtggcgtacgctgccagaaggtggcgtgccgctgccagaaggtggcgtgctttgccagaaggtggcgtgatctgccagaaggtggcgtacgctgccagaaggtggcg

SEQ ID NO: 7194 - DNA, 135 bp, synthetic construct
  source 1..135: mol_type = other DNA
cgccatctagtggctgatctcgccatctagtggctacgctcgccatctagtggctgccgctcgccatctagtggctgctttcgccatctagtggctgatctcgccatctagtggctacgctcgccatctagtggc

SEQ ID NO: 7195 - DNA, 135 bp, synthetic construct
  source 1..135: mol_type = other DNA
gccactagatggcgtgatctgccactagatggcgtacgctgccactagatggcgtgccgctgccactagatggcgtgctttgccactagatggcgtgatctgccactagatggcgtacgctgccactagatggcg

SEQ ID NO: 7196 - DNA, 135 bp, synthetic construct
  source 1..135: mol_type = other DNA
cgccatctactggctgatctcgccatctactggctacgctcgccatctactggctgccgctcgccatctactggctgctttcgccatctactggctgatctcgccatctactggctacgctcgccatctactggc

SEQ ID NO: 7197 - DNA, 135 bp, synthetic construct
  source 1..135: mol_type = other DNA
gccagtagatggcgtgatctgccagtagatggcgtacgctgccagtagatggcgtgccgctgccagtagatggcgtgctttgccagtagatggcgtgatctgccagtagatggcgtacgctgccagtagatggcg

SEQ ID NO: 7198 - DNA, 135 bp, synthetic construct
  source 1..135: mol_type = other DNA
cgccatctggtggctgatctcgccatctggtggctacgctcgccatctggtggctgccgctcgccatctggtggctgctttcgccatctggtggctgatctcgccatctggtggctacgctcgccatctggtggc

SEQ ID NO: 7199 - DNA, 135 bp, synthetic construct
  source 1..135: mol_type = other DNA
gccaccagatggcgtgatctgccaccagatggcgtacgctgccaccagatggcgtgccgctgccaccagatggcgtgctttgccaccagatggcgtgatctgccaccagatggcgtacgctgccaccagatggcg

SEQ ID NO: 7200 - DNA, 135 bp, synthetic construct
  source 1..135: mol_type = other DNA
cgccatctgctggctgatctcgccatctgctggctacgctcgccatctgctggctgccgctcgccatctgctggctgctttcgccatctgctggctgatctcgccatctgctggctacgctcgccatctgctggc

SEQ ID NO: 7201 - DNA, 135 bp, synthetic construct
  source 1..135: mol_type = other DNA
gccagcagatggcgtgatctgccagcagatggcgtacgctgccagcagatggcgtgccgctgccagcagatggcgtgctttgccagcagatggcgtgatctgccagcagatggcgtacgctgccagcagatggcg

SEQ ID NO: 7202 - DNA, 135 bp, synthetic construct
  source 1..135: mol_type = other DNA
cgccatcttgtggctgatctcgccatcttgtggctacgctcgccatcttgtggctgccgctcgccatcttgtggctgctttcgccatcttgtggctgatctcgccatcttgtggctacgctcgccatcttgtggc

SEQ ID NO: 7203 - DNA, 135 bp, synthetic construct
  source 1..135: mol_type = other DNA
gccacaagatggcgtgatctgccacaagatggcgtacgctgccacaagatggcgtgccgctgccacaagatggcgtgctttgccacaagatggcgtgatctgccacaagatggcgtacgctgccacaagatggcg

SEQ ID NO: 7204 - DNA, 135 bp, synthetic construct
  source 1..135: mol_type = other DNA
cgccatcttctggctgatctcgccatcttctggctacgctcgccatcttctggctgccgctcgccatcttctggctgctttcgccatcttctggctgatctcgccatcttctggctacgctcgccatcttctggc

SEQ ID NO: 7205 - DNA, 135 bp, synthetic construct
  source 1..135: mol_type = other DNA
gccagaagatggcgtgatctgccagaagatggcgtacgctgccagaagatggcgtgccgctgccagaagatggcgtgctttgccagaagatggcgtgatctgccagaagatggcgtacgctgccagaagatggcg

SEQ ID NO: 7206 - DNA, 135 bp, synthetic construct
  source 1..135: mol_type = other DNA
cgccccctagtggctgatctcgccccctagtggctacgctcgccccctagtggctgccgctcgccccctagtggctgctttcgccccctagtggctgatctcgccccctagtggctacgctcgccccctagtggc

SEQ ID NO: 7207 - DNA, 135 bp, synthetic construct
  source 1..135: mol_type = other DNA
gccactagggggcgtgatctgccactagggggcgtacgctgccactagggggcgtgccgctgccactagggggcgtgctttgccactagggggcgtgatctgccactagggggcgtacgctgccactagggggcg

SEQ ID NO: 7208 - DNA, 135 bp, synthetic construct
  source 1..135: mol_type = other DNA
cgccccctactggctgatctcgccccctactggctacgctcgccccctactggctgccgctcgccccctactggctgctttcgccccctactggctgatctcgccccctactggctacgctcgccccctactggc

SEQ ID NO: 7209 - DNA, 135 bp, synthetic construct
  source 1..135: mol_type = other DNA
gccagtagggggcgtgatctgccagtagggggcgtacgctgccagtagggggcgtgccgctgccagtagggggcgtgctttgccagtagggggcgtgatctgccagtagggggcgtacgctgccagtagggggcg

SEQ ID NO: 7210 - DNA, 135 bp, synthetic construct
  source 1..135: mol_type = other DNA
cgccccctggtggctgatctcgccccctggtggctacgctcgccccctggtggctgccgctcgccccctggtggctgctttcgccccctggtggctgatctcgccccctggtggctacgctcgccccctggtggc

SEQ ID NO: 7211 - DNA, 135 bp, synthetic construct
  source 1..135: mol_type = other DNA
gccaccagggggcgtgatctgccaccagggggcgtacgctgccaccagggggcgtgccgctgccaccagggggcgtgctttgccaccagggggcgtgatctgccaccagggggcgtacgctgccaccagggggcg

SEQ ID NO: 7212 - DNA, 135 bp, synthetic construct
  source 1..135: mol_type = other DNA
cgccccctgctggctgatctcgccccctgctggctacgctcgccccctgctggctgccgctcgccccctgctggctgctttcgccccctgctggctgatctcgccccctgctggctacgctcgccccctgctggc

SEQ ID NO: 7213 - DNA, 135 bp, synthetic construct
  source 1..135: mol_type = other DNA
gccagcagggggcgtgatctgccagcagggggcgtacgctgccagcagggggcgtgccgctgccagcagggggcgtgctttgccagcagggggcgtgatctgccagcagggggcgtacgctgccagcagggggcg

SEQ ID NO: 7214 - DNA, 135 bp, synthetic construct
  source 1..135: mol_type = other DNA
cgcccccttgtggctgatctcgcccccttgtggctacgctcgcccccttgtggctgccgctcgcccccttgtggctgctttcgcccccttgtggctgatctcgcccccttgtggctacgctcgcccccttgtggc

SEQ ID NO: 7215 - DNA, 135 bp, synthetic construct
  source 1..135: mol_type = other DNA
gccacaagggggcgtgatctgccacaagggggcgtacgctgccacaagggggcgtgccgctgccacaagggggcgtgctttgccacaagggggcgtgatctgccacaagggggcgtacgctgccacaagggggcg

SEQ ID NO: 7216 - DNA, 135 bp, synthetic construct
  source 1..135: mol_type = other DNA
cgcccccttctggctgatctcgcccccttctggctacgctcgcccccttctggctgccgctcgcccccttctggctgctttcgcccccttctggctgatctcgcccccttctggctacgctcgcccccttctggc

SEQ ID NO: 7217 - DNA, 135 bp, synthetic construct
  source 1..135: mol_type = other DNA
gccagaagggggcgtgatctgccagaagggggcgtacgctgccagaagggggcgtgccgctgccagaagggggcgtgctttgccagaagggggcgtgatctgccagaagggggcgtacgctgccagaagggggcg

SEQ ID NO: 7218 - DNA, 135 bp, synthetic construct
  source 1..135: mol_type = other DNA
cgccctctagtggctgatctcgccctctagtggctacgctcgccctctagtggctgccgctcgccctctagtggctgctttcgccctctagtggctgatctcgccctctagtggctacgctcgccctctagtggc

SEQ ID NO: 7219 - DNA, 135 bp, synthetic construct
  source 1..135: mol_type = other DNA
gccactagagggcgtgatctgccactagagggcgtacgctgccactagagggcgtgccgctgccactagagggcgtgctttgccactagagggcgtgatctgccactagagggcgtacgctgccactagagggcg

SEQ ID NO: 7220 - DNA, 135 bp, synthetic construct
  source 1..135: mol_type = other DNA
cgccctctactggctgatctcgccctctactggctacgctcgccctctactggctgccgctcgccctctactggctgctttcgccctctactggctgatctcgccctctactggctacgctcgccctctactggc

SEQ ID NO: 7221 - DNA, 135 bp, synthetic construct
  source 1..135: mol_type = other DNA
gccagtagagggcgtgatctgccagtagagggcgtacgctgccagtagagggcgtgccgctgccagtagagggcgtgctttgccagtagagggcgtgatctgccagtagagggcgtacgctgccagtagagggcg

SEQ ID NO: 7222 - DNA, 135 bp, synthetic construct
  source 1..135: mol_type = other DNA
cgccctctggtggctgatctcgccctctggtggctacgctcgccctctggtggctgccgctcgccctctggtggctgctttcgccctctggtggctgatctcgccctctggtggctacgctcgccctctggtggc

SEQ ID NO: 7223 - DNA, 135 bp, synthetic construct
  source 1..135: mol_type = other DNA
gccaccagagggcgtgatctgccaccagagggcgtacgctgccaccagagggcgtgccgctgccaccagagggcgtgctttgccaccagagggcgtgatctgccaccagagggcgtacgctgccaccagagggcg

SEQ ID NO: 7224 - DNA, 135 bp, synthetic construct
  source 1..135: mol_type = other DNA
cgccctctgctggctgatctcgccctctgctggctacgctcgccctctgctggctgccgctcgccctctgctggctgctttcgccctctgctggctgatctcgccctctgctggctacgctcgccctctgctggc

SEQ ID NO: 7225 - DNA, 135 bp, synthetic construct
  source 1..135: mol_type = other DNA
gccagcagagggcgtgatctgccagcagagggcgtacgctgccagcagagggcgtgccgctgccagcagagggcgtgctttgccagcagagggcgtgatctgccagcagagggcgtacgctgccagcagagggcg

SEQ ID NO: 7226 - DNA, 135 bp, synthetic construct
  source 1..135: mol_type = other DNA
cgccctcttgtggctgatctcgccctcttgtggctacgctcgccctcttgtggctgccgctcgccctcttgtggctgctttcgccctcttgtggctgatctcgccctcttgtggctacgctcgccctcttgtggc

SEQ ID NO: 7227 - DNA, 135 bp, synthetic construct
  source 1..135: mol_type = other DNA
gccacaagagggcgtgatctgccacaagagggcgtacgctgccacaagagggcgtgccgctgccacaagagggcgtgctttgccacaagagggcgtgatctgccacaagagggcgtacgctgccacaagagggcg

SEQ ID NO: 7228 - DNA, 135 bp, synthetic construct
  source 1..135: mol_type = other DNA
cgccctcttctggctgatctcgccctcttctggctacgctcgccctcttctggctgccgctcgccctcttctggctgctttcgccctcttctggctgatctcgccctcttctggctacgctcgccctcttctggc

SEQ ID NO: 7229 - DNA, 135 bp, synthetic construct
  source 1..135: mol_type = other DNA
gccagaagagggcgtgatctgccagaagagggcgtacgctgccagaagagggcgtgccgctgccagaagagggcgtgctttgccagaagagggcgtgatctgccagaagagggcgtacgctgccagaagagggcg

SEQ ID NO: 7230 - DNA, 135 bp, synthetic construct
  source 1..135: mol_type = other DNA
tgccacctagtggctgatcttgccacctagtggctacgcttgccacctagtggctgccgcttgccacctagtggctgcttttgccacctagtggctgatcttgccacctagtggctacgcttgccacctagtggc

SEQ ID NO: 7231 - DNA, 135 bp, synthetic construct
  source 1..135: mol_type = other DNA
gccactaggtggcatgatctgccactaggtggcatacgctgccactaggtggcatgccgctgccactaggtggcatgctttgccactaggtggcatgatctgccactaggtggcatacgctgccactaggtggca

SEQ ID NO: 7232 - DNA, 135 bp, synthetic construct
  source 1..135: mol_type = other DNA
tgccacctactggctgatcttgccacctactggctacgcttgccacctactggctgccgcttgccacctactggctgcttttgccacctactggctgatcttgccacctactggctacgcttgccacctactggc

SEQ ID NO: 7233 - DNA, 135 bp, synthetic construct
  source 1..135: mol_type = other DNA
gccagtaggtggcatgatctgccagtaggtggcatacgctgccagtaggtggcatgccgctgccagtaggtggcatgctttgccagtaggtggcatgatctgccagtaggtggcatacgctgccagtaggtggca

SEQ ID NO: 7234 - DNA, 135 bp, synthetic construct
  source 1..135: mol_type = other DNA
tgccacctggtggctgatcttgccacctggtggctacgcttgccacctggtggctgccgcttgccacctggtggctgcttttgccacctggtggctgatcttgccacctggtggctacgcttgccacctggtggc

SEQ ID NO: 7235 - DNA, 135 bp, synthetic construct
  source 1..135: mol_type = other DNA
gccaccaggtggcatgatctgccaccaggtggcatacgctgccaccaggtggcatgccgctgccaccaggtggcatgctttgccaccaggtggcatgatctgccaccaggtggcatacgctgccaccaggtggca

SEQ ID NO: 7236 - DNA, 135 bp, synthetic construct
  source 1..135: mol_type = other DNA
tgccacctgctggctgatcttgccacctgctggctacgcttgccacctgctggctgccgcttgccacctgctggctgcttttgccacctgctggctgatcttgccacctgctggctacgcttgccacctgctggc

SEQ ID NO: 7237 - DNA, 135 bp, synthetic construct
  source 1..135: mol_type = other DNA
gccagcaggtggcatgatctgccagcaggtggcatacgctgccagcaggtggcatgccgctgccagcaggtggcatgctttgccagcaggtggcatgatctgccagcaggtggcatacgctgccagcaggtggca

SEQ ID NO: 7238 - DNA, 135 bp, synthetic construct
  source 1..135: mol_type = other DNA
tgccaccttgtggctgatcttgccaccttgtggctacgcttgccaccttgtggctgccgcttgccaccttgtggctgcttttgccaccttgtggctgatcttgccaccttgtggctacgcttgccaccttgtggc

SEQ ID NO: 7239 - DNA, 135 bp, synthetic construct
  source 1..135: mol_type = other DNA
gccacaaggtggcatgatctgccacaaggtggcatacgctgccacaaggtggcatgccgctgccacaaggtggcatgctttgccacaaggtggcatgatctgccacaaggtggcatacgctgccacaaggtggca

SEQ ID NO: 7240 - DNA, 135 bp, synthetic construct
  source 1..135: mol_type = other DNA
tgccaccttctggctgatcttgccaccttctggctacgcttgccaccttctggctgccgcttgccaccttctggctgcttttgccaccttctggctgatcttgccaccttctggctacgcttgccaccttctggc

SEQ ID NO: 7241 - DNA, 135 bp, synthetic construct
  source 1..135: mol_type = other DNA
gccagaaggtggcatgatctgccagaaggtggcatacgctgccagaaggtggcatgccgctgccagaaggtggcatgctttgccagaaggtggcatgatctgccagaaggtggcatacgctgccagaaggtggca

SEQ ID NO: 7242 - DNA, 135 bp, synthetic construct
  source 1..135: mol_type = other DNA
tgccatctagtggctgatcttgccatctagtggctacgcttgccatctagtggctgccgcttgccatctagtggctgcttttgccatctagtggctgatcttgccatctagtggctacgcttgccatctagtggc

SEQ ID NO: 7243 - DNA, 135 bp, synthetic construct
  source 1..135: mol_type = other DNA
gccactagatggcatgatctgccactagatggcatacgctgccactagatggcatgccgctgccactagatggcatgctttgccactagatggcatgatctgccactagatggcatacgctgccactagatggca

SEQ ID NO: 7244 - DNA, 135 bp, synthetic construct
  source 1..135: mol_type = other DNA
tgccatctactggctgatcttgccatctactggctacgcttgccatctactggctgccgcttgccatctactggctgcttttgccatctactggctgatcttgccatctactggctacgcttgccatctactggc

SEQ ID NO: 7245 - DNA, 135 bp, synthetic construct
  source 1..135: mol_type = other DNA
gccagtagatggcatgatctgccagtagatggcatacgctgccagtagatggcatgccgctgccagtagatggcatgctttgccagtagatggcatgatctgccagtagatggcatacgctgccagtagatggca

SEQ ID NO: 7246 - DNA, 135 bp, synthetic construct
  source 1..135: mol_type = other DNA
tgccatctggtggctgatcttgccatctggtggctacgcttgccatctggtggctgccgcttgccatctggtggctgcttttgccatctggtggctgatcttgccatctggtggctacgcttgccatctggtggc

SEQ ID NO: 7247 - DNA, 135 bp, synthetic construct
  source 1..135: mol_type = other DNA
gccaccagatggcatgatctgccaccagatggcatacgctgccaccagatggcatgccgctgccaccagatggcatgctttgccaccagatggcatgatctgccaccagatggcatacgctgccaccagatggca

SEQ ID NO: 7248 - DNA, 135 bp, synthetic construct
  source 1..135: mol_type = other DNA
tgccatctgctggctgatcttgccatctgctggctacgcttgccatctgctggctgccgcttgccatctgctggctgcttttgccatctgctggctgatcttgccatctgctggctacgcttgccatctgctggc

SEQ ID NO: 7249 - DNA, 135 bp, synthetic construct
  source 1..135: mol_type = other DNA
gccagcagatggcatgatctgccagcagatggcatacgctgccagcagatggcatgccgctgccagcagatggcatgctttgccagcagatggcatgatctgccagcagatggcatacgctgccagcagatggca

SEQ ID NO: 7250 - DNA, 135 bp, synthetic construct
  source 1..135: mol_type = other DNA
tgccatcttgtggctgatcttgccatcttgtggctacgcttgccatcttgtggctgccgcttgccatcttgtggctgcttttgccatcttgtggctgatcttgccatcttgtggctacgcttgccatcttgtggc

SEQ ID NO: 7251 - DNA, 135 bp, synthetic construct
  source 1..135: mol_type = other DNA
gccacaagatggcatgatctgccacaagatggcatacgctgccacaagatggcatgccgctgccacaagatggcatgctttgccacaagatggcatgatctgccacaagatggcatacgctgccacaagatggca

SEQ ID NO: 7252 - DNA, 135 bp, synthetic construct
  source 1..135: mol_type = other DNA
tgccatcttctggctgatcttgccatcttctggctacgcttgccatcttctggctgccgcttgccatcttctggctgcttttgccatcttctggctgatcttgccatcttctggctacgcttgccatcttctggc

SEQ ID NO: 7253 - DNA, 135 bp, synthetic construct
  source 1..135: mol_type = other DNA
gccagaagatggcatgatctgccagaagatggcatacgctgccagaagatggcatgccgctgccagaagatggcatgctttgccagaagatggcatgatctgccagaagatggcatacgctgccagaagatggca

SEQ ID NO: 7254 - DNA, 135 bp, synthetic construct
  source 1..135: mol_type = other DNA
tgccccctagtggctgatcttgccccctagtggctacgcttgccccctagtggctgccgcttgccccctagtggctgcttttgccccctagtggctgatcttgccccctagtggctacgcttgccccctagtggc

SEQ ID NO: 7255 - DNA, 135 bp, synthetic construct
  source 1..135: mol_type = other DNA
gccactagggggcatgatctgccactagggggcatacgctgccactagggggcatgccgctgccactagggggcatgctttgccactagggggcatgatctgccactagggggcatacgctgccactagggggca

SEQ ID NO: 7256 - DNA, 135 bp, synthetic construct
  source 1..135: mol_type = other DNA
tgccccctactggctgatcttgccccctactggctacgcttgccccctactggctgccgcttgccccctactggctgcttttgccccctactggctgatcttgccccctactggctacgcttgccccctactggc

SEQ ID NO: 7257 - DNA, 135 bp, synthetic construct
  source 1..135: mol_type = other DNA
gccagtagggggcatgatctgccagtagggggcatacgctgccagtagggggcatgccgctgccagtagggggcatgctttgccagtagggggcatgatctgccagtagggggcatacgctgccagtagggggca

SEQ ID NO: 7258 - DNA, 135 bp, synthetic construct
  source 1..135: mol_type = other DNA
tgccccctggtggctgatcttgccccctggtggctacgcttgccccctggtggctgccgcttgccccctggtggctgcttttgccccctggtggctgatcttgccccctggtggctacgcttgccccctggtggc

SEQ ID NO: 7259 - DNA, 135 bp, synthetic construct
  source 1..135: mol_type = other DNA
gccaccagggggcatgatctgccaccagggggcatacgctgccaccagggggcatgccgctgccaccagggggcatgctttgccaccagggggcatgatctgccaccagggggcatacgctgccaccagggggca

SEQ ID NO: 7260 - DNA, 135 bp, synthetic construct
  source 1..135: mol_type = other DNA
tgccccctgctggctgatcttgccccctgctggctacgcttgccccctgctggctgccgcttgccccctgctggctgcttttgccccctgctggctgatcttgccccctgctggctacgcttgccccctgctggc

SEQ ID NO: 7261 - DNA, 135 bp, synthetic construct
  source 1..135: mol_type = other DNA
gccagcagggggcatgatctgccagcagggggcatacgctgccagcagggggcatgccgctgccagcagggggcatgctttgccagcagggggcatgatctgccagcagggggcatacgctgccagcagggggca

SEQ ID NO: 7262 - DNA, 135 bp, synthetic construct
  source 1..135: mol_type = other DNA
tgcccccttgtggctgatcttgcccccttgtggctacgcttgcccccttgtggctgccgcttgcccccttgtggctgcttttgcccccttgtggctgatcttgcccccttgtggctacgcttgcccccttgtggc

SEQ ID NO: 7263 - DNA, 135 bp, synthetic construct
  source 1..135: mol_type = other DNA
gccacaagggggcatgatctgccacaagggggcatacgctgccacaagggggcatgccgctgccacaagggggcatgctttgccacaagggggcatgatctgccacaagggggcatacgctgccacaagggggca

SEQ ID NO: 7264 - DNA, 135 bp, synthetic construct
  source 1..135: mol_type = other DNA
tgcccccttctggctgatcttgcccccttctggctacgcttgcccccttctggctgccgcttgcccccttctggctgcttttgcccccttctggctgatcttgcccccttctggctacgcttgcccccttctggc

SEQ ID NO: 7265 - DNA, 135 bp, synthetic construct
  source 1..135: mol_type = other DNA
gccagaagggggcatgatctgccagaagggggcatacgctgccagaagggggcatgccgctgccagaagggggcatgctttgccagaagggggcatgatctgccagaagggggcatacgctgccagaagggggca

SEQ ID NO: 7266 - DNA, 135 bp, synthetic construct
  source 1..135: mol_type = other DNA
tgccctctagtggctgatcttgccctctagtggctacgcttgccctctagtggctgccgcttgccctctagtggctgcttttgccctctagtggctgatcttgccctctagtggctacgcttgccctctagtggc

SEQ ID NO: 7267 - DNA, 135 bp, synthetic construct
  source 1..135: mol_type = other DNA
gccactagagggcatgatctgccactagagggcatacgctgccactagagggcatgccgctgccactagagggcatgctttgccactagagggcatgatctgccactagagggcatacgctgccactagagggca

SEQ ID NO: 7268 - DNA, 135 bp, synthetic construct
  source 1..135: mol_type = other DNA
tgccctctactggctgatcttgccctctactggctacgcttgccctctactggctgccgcttgccctctactggctgcttttgccctctactggctgatcttgccctctactggctacgcttgccctctactggc

SEQ ID NO: 7269 - DNA, 135 bp, synthetic construct
  source 1..135: mol_type = other DNA
gccagtagagggcatgatctgccagtagagggcatacgctgccagtagagggcatgccgctgccagtagagggcatgctttgccagtagagggcatgatctgccagtagagggcatacgctgccagtagagggca

SEQ ID NO: 7270 - DNA, 135 bp, synthetic construct
  source 1..135: mol_type = other DNA
tgccctctggtggctgatcttgccctctggtggctacgcttgccctctggtggctgccgcttgccctctggtggctgcttttgccctctggtggctgatcttgccctctggtggctacgcttgccctctggtggc

SEQ ID NO: 7271 - DNA, 135 bp, synthetic construct
  source 1..135: mol_type = other DNA
gccaccagagggcatgatctgccaccagagggcatacgctgccaccagagggcatgccgctgccaccagagggcatgctttgccaccagagggcatgatctgccaccagagggcatacgctgccaccagagggca

SEQ ID NO: 7272 - DNA, 135 bp, synthetic construct
  source 1..135: mol_type = other DNA
tgccctctgctggctgatcttgccctctgctggctacgcttgccctctgctggctgccgcttgccctctgctggctgcttttgccctctgctggctgatcttgccctctgctggctacgcttgccctctgctggc

SEQ ID NO: 7273 - DNA, 135 bp, synthetic construct
  source 1..135: mol_type = other DNA
gccagcagagggcatgatctgccagcagagggcatacgctgccagcagagggcatgccgctgccagcagagggcatgctttgccagcagagggcatgatctgccagcagagggcatacgctgccagcagagggca

SEQ ID NO: 7274 - DNA, 135 bp, synthetic construct
  source 1..135: mol_type = other DNA
tgccctcttgtggctgatcttgccctcttgtggctacgcttgccctcttgtggctgccgcttgccctcttgtggctgcttttgccctcttgtggctgatcttgccctcttgtggctacgcttgccctcttgtggc

SEQ ID NO: 7275 - DNA, 135 bp, synthetic construct
  source 1..135: mol_type = other DNA
gccacaagagggcatgatctgccacaagagggcatacgctgccacaagagggcatgccgctgccacaagagggcatgctttgccacaagagggcatgatctgccacaagagggcatacgctgccacaagagggca

SEQ ID NO: 7276 - DNA, 135 bp, synthetic construct
  source 1..135: mol_type = other DNA
tgccctcttctggctgatcttgccctcttctggctacgcttgccctcttctggctgccgcttgccctcttctggctgcttttgccctcttctggctgatcttgccctcttctggctacgcttgccctcttctggc

SEQ ID NO: 7277 - DNA, 135 bp, synthetic construct
  source 1..135: mol_type = other DNA
gccagaagagggcatgatctgccagaagagggcatacgctgccagaagagggcatgccgctgccagaagagggcatgctttgccagaagagggcatgatctgccagaagagggcatacgctgccagaagagggca

SEQ ID NO: 7278 - DNA, 142 bp, synthetic construct
  source 1..142: mol_type = other DNA
tgttgcctagcaacatgatcttgttgcctagcaacatacgcttgttgcctagcaacatgccgcttgttgcctagcaacatgcttttgttgcctagcaacatgatcttgttgcctagcaacatacgcttgttgcctagcaaca

SEQ ID NO: 7279 - DNA, 142 bp, synthetic construct
  source 1..142: mol_type = other DNA
tgttgctaggcaacatgatcttgttgctaggcaacatacgcttgttgctaggcaacatgccgcttgttgctaggcaacatgcttttgttgctaggcaacatgatcttgttgctaggcaacatacgcttgttgctaggcaaca

SEQ ID NO: 7280 - DNA, 142 bp, synthetic construct
  source 1..142: mol_type = other DNA
tgttgcctagcaacctgatcttgttgcctagcaacctacgcttgttgcctagcaacctgccgcttgttgcctagcaacctgcttttgttgcctagcaacctgatcttgttgcctagcaacctacgcttgttgcctagcaacc

SEQ ID NO: 7281 - DNA, 142 bp, synthetic construct
  source 1..142: mol_type = other DNA
ggttgctaggcaacatgatctggttgctaggcaacatacgctggttgctaggcaacatgccgctggttgctaggcaacatgctttggttgctaggcaacatgatctggttgctaggcaacatacgctggttgctaggcaaca

SEQ ID NO: 7282 - DNA, 142 bp, synthetic construct
  source 1..142: mol_type = other DNA
tgtttcctagcaacatgatcttgtttcctagcaacatacgcttgtttcctagcaacatgccgcttgtttcctagcaacatgcttttgtttcctagcaacatgatcttgtttcctagcaacatacgcttgtttcctagcaaca

SEQ ID NO: 7283 - DNA, 142 bp, synthetic construct
  source 1..142: mol_type = other DNA
tgttgctaggaaacatgatcttgttgctaggaaacatacgcttgttgctaggaaacatgccgcttgttgctaggaaacatgcttttgttgctaggaaacatgatcttgttgctaggaaacatacgcttgttgctaggaaaca

SEQ ID NO: 7284 - DNA, 142 bp, synthetic construct
  source 1..142: mol_type = other DNA
tgtttcctagcaacctgatcttgtttcctagcaacctacgcttgtttcctagcaacctgccgcttgtttcctagcaacctgcttttgtttcctagcaacctgatcttgtttcctagcaacctacgcttgtttcctagcaacc

SEQ ID NO: 7285 - DNA, 142 bp, synthetic construct
  source 1..142: mol_type = other DNA
ggttgctaggaaacatgatctggttgctaggaaacatacgctggttgctaggaaacatgccgctggttgctaggaaacatgctttggttgctaggaaacatgatctggttgctaggaaacatacgctggttgctaggaaaca

SEQ ID NO: 7286 - DNA, 125 bp, synthetic construct
  source 1..125: mol_type = other DNA
gacagtcagagggaggaggctgccgctgacagtcagagggaggaggctgctttgacagtcagagggaggaggctgatctgacagtcagagggaggaggctacgctgacagtcagagggaggaggc

SEQ ID NO: 7287 - DNA, 125 bp, synthetic construct
  source 1..125: mol_type = other DNA
gcctcctccctctgactgtctgccgctgcctcctccctctgactgtctgctttgcctcctccctctgactgtctgatctgcctcctccctctgactgtctacgctgcctcctccctctgactgtc

SEQ ID NO: 7288 - DNA, 125 bp, synthetic construct
  source 1..125: mol_type = other DNA
gacagtcagatggaggaggctgccgctgacagtcagatggaggaggctgctttgacagtcagatggaggaggctgatctgacagtcagatggaggaggctacgctgacagtcagatggaggaggc

SEQ ID NO: 7289 - DNA, 125 bp, synthetic construct
  source 1..125: mol_type = other DNA
gcctcctccatctgactgtctgccgctgcctcctccatctgactgtctgctttgcctcctccatctgactgtctgatctgcctcctccatctgactgtctacgctgcctcctccatctgactgtc

SEQ ID NO: 7290 - DNA, 125 bp, synthetic construct
  source 1..125: mol_type = other DNA
gacagtctgagggaggaggctgccgctgacagtctgagggaggaggctgctttgacagtctgagggaggaggctgatctgacagtctgagggaggaggctacgctgacagtctgagggaggaggc

SEQ ID NO: 7291 - DNA, 125 bp, synthetic construct
  source 1..125: mol_type = other DNA
gcctcctccctcagactgtctgccgctgcctcctccctcagactgtctgctttgcctcctccctcagactgtctgatctgcctcctccctcagactgtctacgctgcctcctccctcagactgtc

SEQ ID NO: 7292 - DNA, 125 bp, synthetic construct
  source 1..125: mol_type = other DNA
gacagtctgatggaggaggctgccgctgacagtctgatggaggaggctgctttgacagtctgatggaggaggctgatctgacagtctgatggaggaggctacgctgacagtctgatggaggaggc

SEQ ID NO: 7293 - DNA, 125 bp, synthetic construct
  source 1..125: mol_type = other DNA
gcctcctccatcagactgtctgccgctgcctcctccatcagactgtctgctttgcctcctccatcagactgtctgatctgcctcctccatcagactgtctacgctgcctcctccatcagactgtc

SEQ ID NO: 7294 - DNA, 125 bp, synthetic construct
  source 1..125: mol_type = other DNA
gccagtcagagggaggaggctgccgctgccagtcagagggaggaggctgctttgccagtcagagggaggaggctgatctgccagtcagagggaggaggctacgctgccagtcagagggaggaggc

SEQ ID NO: 7295 - DNA, 125 bp, synthetic construct
  source 1..125: mol_type = other DNA
gcctcctccctctgactggctgccgctgcctcctccctctgactggctgctttgcctcctccctctgactggctgatctgcctcctccctctgactggctacgctgcctcctccctctgactggc

SEQ ID NO: 7296 - DNA, 125 bp, synthetic construct
  source 1..125: mol_type = other DNA
gccagtcagatggaggaggctgccgctgccagtcagatggaggaggctgctttgccagtcagatggaggaggctgatctgccagtcagatggaggaggctacgctgccagtcagatggaggaggc

SEQ ID NO: 7297 - DNA, 125 bp, synthetic construct
  source 1..125: mol_type = other DNA
gcctcctccatctgactggctgccgctgcctcctccatctgactggctgctttgcctcctccatctgactggctgatctgcctcctccatctgactggctacgctgcctcctccatctgactggc

SEQ ID NO: 7298 - DNA, 125 bp, synthetic construct
  source 1..125: mol_type = other DNA
gccagtctgagggaggaggctgccgctgccagtctgagggaggaggctgctttgccagtctgagggaggaggctgatctgccagtctgagggaggaggctacgctgccagtctgagggaggaggc

SEQ ID NO: 7299 - DNA, 125 bp, synthetic construct
  source 1..125: mol_type = other DNA
gcctcctccctcagactggctgccgctgcctcctccctcagactggctgctttgcctcctccctcagactggctgatctgcctcctccctcagactggctacgctgcctcctccctcagactggc

SEQ ID NO: 7300 - DNA, 125 bp, synthetic construct
  source 1..125: mol_type = other DNA
gccagtctgatggaggaggctgccgctgccagtctgatggaggaggctgctttgccagtctgatggaggaggctgatctgccagtctgatggaggaggctacgctgccagtctgatggaggaggc

SEQ ID NO: 7301 - DNA, 125 bp, synthetic construct
  source 1..125: mol_type = other DNA
gcctcctccatcagactggctgccgctgcctcctccatcagactggctgctttgcctcctccatcagactggctgatctgcctcctccatcagactggctacgctgcctcctccatcagactggc

SEQ ID NO: 7302 - DNA, 125 bp, synthetic construct
  source 1..125: mol_type = other DNA
cacagtcagagggaggaggctgccgctcacagtcagagggaggaggctgctttcacagtcagagggaggaggctgatctcacagtcagagggaggaggctacgctcacagtcagagggaggaggc

SEQ ID NO: 7303 - DNA, 125 bp, synthetic construct
  source 1..125: mol_type = other DNA
gcctcctccctctgactgtgtgccgctgcctcctccctctgactgtgtgctttgcctcctccctctgactgtgtgatctgcctcctccctctgactgtgtacgctgcctcctccctctgactgtg

SEQ ID NO: 7304 - DNA, 125 bp, synthetic construct
  source 1..125: mol_type = other DNA
cacagtcagatggaggaggctgccgctcacagtcagatggaggaggctgctttcacagtcagatggaggaggctgatctcacagtcagatggaggaggctacgctcacagtcagatggaggaggc

SEQ ID NO: 7305 - DNA, 125 bp, synthetic construct
  source 1..125: mol_type = other DNA
gcctcctccatctgactgtgtgccgctgcctcctccatctgactgtgtgctttgcctcctccatctgactgtgtgatctgcctcctccatctgactgtgtacgctgcctcctccatctgactgtg

SEQ ID NO: 7306 - DNA, 125 bp, synthetic construct
  source 1..125: mol_type = other DNA
cacagtctgagggaggaggctgccgctcacagtctgagggaggaggctgctttcacagtctgagggaggaggctgatctcacagtctgagggaggaggctacgctcacagtctgagggaggaggc

SEQ ID NO: 7307 - DNA, 125 bp, synthetic construct
  source 1..125: mol_type = other DNA
gcctcctccctcagactgtgtgccgctgcctcctccctcagactgtgtgctttgcctcctccctcagactgtgtgatctgcctcctccctcagactgtgtacgctgcctcctccctcagactgtg

SEQ ID NO: 7308 - DNA, 125 bp, synthetic construct
  source 1..125: mol_type = other DNA
cacagtctgatggaggaggctgccgctcacagtctgatggaggaggctgctttcacagtctgatggaggaggctgatctcacagtctgatggaggaggctacgctcacagtctgatggaggaggc

SEQ ID NO: 7309 - DNA, 125 bp, synthetic construct
  source 1..125: mol_type = other DNA
gcctcctccatcagactgtgtgccgctgcctcctccatcagactgtgtgctttgcctcctccatcagactgtgtgatctgcctcctccatcagactgtgtacgctgcctcctccatcagactgtg

SEQ ID NO: 7310 - DNA, 125 bp, synthetic construct
  source 1..125: mol_type = other DNA
cccagtcagagggaggaggctgccgctcccagtcagagggaggaggctgctttcccagtcagagggaggaggctgatctcccagtcagagggaggaggctacgctcccagtcagagggaggaggc

SEQ ID NO: 7311 - DNA, 125 bp, synthetic construct
  source 1..125: mol_type = other DNA
gcctcctccctctgactgggtgccgctgcctcctccctctgactgggtgctttgcctcctccctctgactgggtgatctgcctcctccctctgactgggtacgctgcctcctccctctgactggg

SEQ ID NO: 7312 - DNA, 125 bp, synthetic construct
  source 1..125: mol_type = other DNA
cccagtcagatggaggaggctgccgctcccagtcagatggaggaggctgctttcccagtcagatggaggaggctgatctcccagtcagatggaggaggctacgctcccagtcagatggaggaggc

SEQ ID NO: 7313 - DNA, 125 bp, synthetic construct
  source 1..125: mol_type = other DNA
gcctcctccatctgactgggtgccgctgcctcctccatctgactgggtgctttgcctcctccatctgactgggtgatctgcctcctccatctgactgggtacgctgcctcctccatctgactggg

SEQ ID NO: 7314 - DNA, 125 bp, synthetic construct
  source 1..125: mol_type = other DNA
cccagtctgagggaggaggctgccgctcccagtctgagggaggaggctgctttcccagtctgagggaggaggctgatctcccagtctgagggaggaggctacgctcccagtctgagggaggaggc

SEQ ID NO: 7315 - DNA, 125 bp, synthetic construct
  source 1..125: mol_type = other DNA
gcctcctccctcagactgggtgccgctgcctcctccctcagactgggtgctttgcctcctccctcagactgggtgatctgcctcctccctcagactgggtacgctgcctcctccctcagactggg

SEQ ID NO: 7316 - DNA, 125 bp, synthetic construct
  source 1..125: mol_type = other DNA
cccagtctgatggaggaggctgccgctcccagtctgatggaggaggctgctttcccagtctgatggaggaggctgatctcccagtctgatggaggaggctacgctcccagtctgatggaggaggc

SEQ ID NO: 7317 - DNA, 125 bp, synthetic construct
  source 1..125: mol_type = other DNA
gcctcctccatcagactgggtgccgctgcctcctccatcagactgggtgctttgcctcctccatcagactgggtgatctgcctcctccatcagactgggtacgctgcctcctccatcagactggg

SEQ ID NO: 7318 - DNA, 146 bp, synthetic construct
  source 1..146: mol_type = other DNA
cccccccactacgctcccccccactgccgctcccccccactgctttcccccccactgatctcccccccactacgctcccccccactgccgctcccccccactgctttcccccccactgatctcccccccactacgctcccccccac

SEQ ID NO: 7319 - DNA, 146 bp, synthetic construct
  source 1..146: mol_type = other DNA
gtgggggggtacgctgtgggggggtgccgctgtgggggggtgctttgtgggggggtgatctgtgggggggtacgctgtgggggggtgccgctgtgggggggtgctttgtgggggggtgatctgtgggggggtacgctgtggggggg

SEQ ID NO: 7320 - DNA, 135 bp, synthetic construct
  source 1..135: mol_type = other DNA
tgtttattttggcatgatcttgtttattttggcatacgcttgtttattttggcatgccgcttgtttattttggcatgcttttgtttattttggcatgatcttgtttattttggcatacgcttgtttattttggca

SEQ ID NO: 7321 - DNA, 135 bp, synthetic construct
  source 1..135: mol_type = other DNA
tgccaaaataaacatgatcttgccaaaataaacatacgcttgccaaaataaacatgccgcttgccaaaataaacatgcttttgccaaaataaacatgatcttgccaaaataaacatacgcttgccaaaataaaca

SEQ ID NO: 7322 - DNA, 136 bp, synthetic construct
  source 1..136: mol_type = other DNA
gagataagtacgctgagataagtgccgctgagataagtgctttgagataagtgatctgagataagtacgctgagataagtgccgctgagataagtgctttgagataagtgatctgagataagtacgctgagataag

SEQ ID NO: 7323 - DNA, 136 bp, synthetic construct
  source 1..136: mol_type = other DNA
cttatctctacgctcttatctctgccgctcttatctctgctttcttatctctgatctcttatctctacgctcttatctctgccgctcttatctctgctttcttatctctgatctcttatctctacgctcttatctc

SEQ ID NO: 7324 - DNA, 136 bp, synthetic construct
  source 1..136: mol_type = other DNA
cagataagtacgctcagataagtgccgctcagataagtgctttcagataagtgatctcagataagtacgctcagataagtgccgctcagataagtgctttcagataagtgatctcagataagtacgctcagataag

SEQ ID NO: 7325 - DNA, 136 bp, synthetic construct
  source 1..136: mol_type = other DNA
cttatctgtacgctcttatctgtgccgctcttatctgtgctttcttatctgtgatctcttatctgtacgctcttatctgtgccgctcttatctgtgctttcttatctgtgatctcttatctgtacgctcttatctg

SEQ ID NO: 7326 - DNA, 140 bp, synthetic construct
  source 1..140: mol_type = other DNA
taatgattaatgccgcttaatgattaatgcttttaatgattaatgatcttaatgattaatacgcttaatgattaatgccgcttaatgattaatgcttttaatgattaatgatcttaatgattaatacgcttaatgattaa

SEQ ID NO: 7327 - DNA, 140 bp, synthetic construct
  source 1..140: mol_type = other DNA
ttaatcattatgccgctttaatcattatgctttttaatcattatgatctttaatcattatacgctttaatcattatgccgctttaatcattatgctttttaatcattatgatctttaatcattatacgctttaatcatta

SEQ ID NO: 7328 - DNA, 140 bp, synthetic construct
  source 1..140: mol_type = other DNA
taatgattattgccgcttaatgattattgcttttaatgattattgatcttaatgattattacgcttaatgattattgccgcttaatgattattgcttttaatgattattgatcttaatgattattacgcttaatgattat

SEQ ID NO: 7329 - DNA, 140 bp, synthetic construct
  source 1..140: mol_type = other DNA
ataatcattatgccgctataatcattatgctttataatcattatgatctataatcattatacgctataatcattatgccgctataatcattatgctttataatcattatgatctataatcattatacgctataatcatta

SEQ ID NO: 7330 - DNA, 140 bp, synthetic construct
  source 1..140: mol_type = other DNA
taatgatttatgccgcttaatgatttatgcttttaatgatttatgatcttaatgatttatacgcttaatgatttatgccgcttaatgatttatgcttttaatgatttatgatcttaatgatttatacgcttaatgattta

SEQ ID NO: 7331 - DNA, 140 bp, synthetic construct
  source 1..140: mol_type = other DNA
taaatcattatgccgcttaaatcattatgcttttaaatcattatgatcttaaatcattatacgcttaaatcattatgccgcttaaatcattatgcttttaaatcattatgatcttaaatcattatacgcttaaatcatta

SEQ ID NO: 7332 - DNA, 140 bp, synthetic construct
  source 1..140: mol_type = other DNA
taatgatttttgccgcttaatgatttttgcttttaatgatttttgatcttaatgatttttacgcttaatgatttttgccgcttaatgatttttgcttttaatgatttttgatcttaatgatttttacgcttaatgatttt

SEQ ID NO: 7333 - DNA, 140 bp, synthetic construct
  source 1..140: mol_type = other DNA
aaaatcattatgccgctaaaatcattatgctttaaaatcattatgatctaaaatcattatacgctaaaatcattatgccgctaaaatcattatgctttaaaatcattatgatctaaaatcattatacgctaaaatcatta

SEQ ID NO: 7334 - DNA, 140 bp, synthetic construct
  source 1..140: mol_type = other DNA
taatggttaatgccgcttaatggttaatgcttttaatggttaatgatcttaatggttaatacgcttaatggttaatgccgcttaatggttaatgcttttaatggttaatgatcttaatggttaatacgcttaatggttaa

SEQ ID NO: 7335 - DNA, 140 bp, synthetic construct
  source 1..140: mol_type = other DNA
ttaaccattatgccgctttaaccattatgctttttaaccattatgatctttaaccattatacgctttaaccattatgccgctttaaccattatgctttttaaccattatgatctttaaccattatacgctttaaccatta

SEQ ID NO: 7336 - DNA, 140 bp, synthetic construct
  source 1..140: mol_type = other DNA
taatggttattgccgcttaatggttattgcttttaatggttattgatcttaatggttattacgcttaatggttattgccgcttaatggttattgcttttaatggttattgatcttaatggttattacgcttaatggttat

SEQ ID NO: 7337 - DNA, 140 bp, synthetic construct
  source 1..140: mol_type = other DNA
ataaccattatgccgctataaccattatgctttataaccattatgatctataaccattatacgctataaccattatgccgctataaccattatgctttataaccattatgatctataaccattatacgctataaccatta

SEQ ID NO: 7338 - DNA, 140 bp, synthetic construct
  source 1..140: mol_type = other DNA
taatggtttatgccgcttaatggtttatgcttttaatggtttatgatcttaatggtttatacgcttaatggtttatgccgcttaatggtttatgcttttaatggtttatgatcttaatggtttatacgcttaatggttta

SEQ ID NO: 7339 - DNA, 140 bp, synthetic construct
  source 1..140: mol_type = other DNA
taaaccattatgccgcttaaaccattatgcttttaaaccattatgatcttaaaccattatacgcttaaaccattatgccgcttaaaccattatgcttttaaaccattatgatcttaaaccattatacgcttaaaccatta

SEQ ID NO: 7340 - DNA, 140 bp, synthetic construct
  source 1..140: mol_type = other DNA
taatggtttttgccgcttaatggtttttgcttttaatggtttttgatcttaatggtttttacgcttaatggtttttgccgcttaatggtttttgcttttaatggtttttgatcttaatggtttttacgcttaatggtttt

SEQ ID NO: 7341 - DNA, 140 bp, synthetic construct
  source 1..140: mol_type = other DNA
aaaaccattatgccgctaaaaccattatgctttaaaaccattatgatctaaaaccattatacgctaaaaccattatgccgctaaaaccattatgctttaaaaccattatgatctaaaaccattatacgctaaaaccatta

SEQ ID NO: 7342 - DNA, 140 bp, synthetic construct
  source 1..140: mol_type = other DNA
taattattaatgccgcttaattattaatgcttttaattattaatgatcttaattattaatacgcttaattattaatgccgcttaattattaatgcttttaattattaatgatcttaattattaatacgcttaattattaa

SEQ ID NO: 7343 - DNA, 140 bp, synthetic construct
  source 1..140: mol_type = other DNA
ttaataattatgccgctttaataattatgctttttaataattatgatctttaataattatacgctttaataattatgccgctttaataattatgctttttaataattatgatctttaataattatacgctttaataatta

SEQ ID NO: 7344 - DNA, 140 bp, synthetic construct
  source 1..140: mol_type = other DNA
taattattattgccgcttaattattattgcttttaattattattgatcttaattattattacgcttaattattattgccgcttaattattattgcttttaattattattgatcttaattattattacgcttaattattat

SEQ ID NO: 7345 - DNA, 140 bp, synthetic construct
  source 1..140: mol_type = other DNA
ataataattatgccgctataataattatgctttataataattatgatctataataattatacgctataataattatgccgctataataattatgctttataataattatgatctataataattatacgctataataatta

SEQ ID NO: 7346 - DNA, 140 bp, synthetic construct
  source 1..140: mol_type = other DNA
taattatttatgccgcttaattatttatgcttttaattatttatgatcttaattatttatacgcttaattatttatgccgcttaattatttatgcttttaattatttatgatcttaattatttatacgcttaattattta

SEQ ID NO: 7347 - DNA, 140 bp, synthetic construct
  source 1..140: mol_type = other DNA
taaataattatgccgcttaaataattatgcttttaaataattatgatcttaaataattatacgcttaaataattatgccgcttaaataattatgcttttaaataattatgatcttaaataattatacgcttaaataatta

SEQ ID NO: 7348 - DNA, 140 bp, synthetic construct
  source 1..140: mol_type = other DNA
taattatttttgccgcttaattatttttgcttttaattatttttgatcttaattatttttacgcttaattatttttgccgcttaattatttttgcttttaattatttttgatcttaattatttttacgcttaattatttt

SEQ ID NO: 7349 - DNA, 140 bp, synthetic construct
  source 1..140: mol_type = other DNA
aaaataattatgccgctaaaataattatgctttaaaataattatgatctaaaataattatacgctaaaataattatgccgctaaaataattatgctttaaaataattatgatctaaaataattatacgctaaaataatta

SEQ ID NO: 7350 - DNA, 140 bp, synthetic construct
  source 1..140: mol_type = other DNA
taattgttaatgccgcttaattgttaatgcttttaattgttaatgatcttaattgttaatacgcttaattgttaatgccgcttaattgttaatgcttttaattgttaatgatcttaattgttaatacgcttaattgttaa

SEQ ID NO: 7351 - DNA, 140 bp, synthetic construct
  source 1..140: mol_type = other DNA
ttaacaattatgccgctttaacaattatgctttttaacaattatgatctttaacaattatacgctttaacaattatgccgctttaacaattatgctttttaacaattatgatctttaacaattatacgctttaacaatta

SEQ ID NO: 7352 - DNA, 140 bp, synthetic construct
  source 1..140: mol_type = other DNA
taattgttattgccgcttaattgttattgcttttaattgttattgatcttaattgttattacgcttaattgttattgccgcttaattgttattgcttttaattgttattgatcttaattgttattacgcttaattgttat

SEQ ID NO: 7353 - DNA, 140 bp, synthetic construct
  source 1..140: mol_type = other DNA
ataacaattatgccgctataacaattatgctttataacaattatgatctataacaattatacgctataacaattatgccgctataacaattatgctttataacaattatgatctataacaattatacgctataacaatta

SEQ ID NO: 7354 - DNA, 140 bp, synthetic construct
  source 1..140: mol_type = other DNA
taattgtttatgccgcttaattgtttatgcttttaattgtttatgatcttaattgtttatacgcttaattgtttatgccgcttaattgtttatgcttttaattgtttatgatcttaattgtttatacgcttaattgttta

SEQ ID NO: 7355 - DNA, 140 bp, synthetic construct
  source 1..140: mol_type = other DNA
taaacaattatgccgcttaaacaattatgcttttaaacaattatgatcttaaacaattatacgcttaaacaattatgccgcttaaacaattatgcttttaaacaattatgatcttaaacaattatacgcttaaacaatta

SEQ ID NO: 7356 - DNA, 140 bp, synthetic construct
  source 1..140: mol_type = other DNA
taattgtttttgccgcttaattgtttttgcttttaattgtttttgatcttaattgtttttacgcttaattgtttttgccgcttaattgtttttgcttttaattgtttttgatcttaattgtttttacgcttaattgtttt

SEQ ID NO: 7357 - DNA, 140 bp, synthetic construct
  source 1..140: mol_type = other DNA
aaaacaattatgccgctaaaacaattatgctttaaaacaattatgatctaaaacaattatacgctaaaacaattatgccgctaaaacaattatgctttaaaacaattatgatctaaaacaattatacgctaaaacaatta

SEQ ID NO: 7358 - DNA, 140 bp, synthetic construct
  source 1..140: mol_type = other DNA
acatcaaaggtgccgctacatcaaaggtgctttacatcaaaggtgatctacatcaaaggtacgctacatcaaaggtgccgctacatcaaaggtgctttacatcaaaggtgatctacatcaaaggtacgctacatcaaagg

SEQ ID NO: 7359 - DNA, 140 bp, synthetic construct
  source 1..140: mol_type = other DNA
cctttgatgttgccgctcctttgatgttgctttcctttgatgttgatctcctttgatgttacgctcctttgatgttgccgctcctttgatgttgctttcctttgatgttgatctcctttgatgttacgctcctttgatgt

SEQ ID NO: 7360 - DNA, 146 bp, synthetic construct
  source 1..146: mol_type = other DNA
ggctagccctacgctggctagccctgccgctggctagccctgctttggctagccctgatctggctagccctacgctggctagccctgccgctggctagccctgctttggctagccctgatctggctagccctacgctggctagccc

SEQ ID NO: 7361 - DNA, 146 bp, synthetic construct
  source 1..146: mol_type = other DNA
gggctagcctacgctgggctagcctgccgctgggctagcctgctttgggctagcctgatctgggctagcctacgctgggctagcctgccgctgggctagcctgctttgggctagcctgatctgggctagcctacgctgggctagcc

SEQ ID NO: 7362 - DNA, 146 bp, synthetic construct
  source 1..146: mol_type = other DNA
ttccaagaatacgctttccaagaatgccgctttccaagaatgctttttccaagaatgatctttccaagaatacgctttccaagaatgccgctttccaagaatgctttttccaagaatgatctttccaagaatacgctttccaagaa

SEQ ID NO: 7363 - DNA, 146 bp, synthetic construct
  source 1..146: mol_type = other DNA
ttcttggaatacgctttcttggaatgccgctttcttggaatgctttttcttggaatgatctttcttggaatacgctttcttggaatgccgctttcttggaatgctttttcttggaatgatctttcttggaatacgctttcttggaa

SEQ ID NO: 7364 - DNA, 146 bp, synthetic construct
  source 1..146: mol_type = other DNA
ttccaggaatacgctttccaggaatgccgctttccaggaatgctttttccaggaatgatctttccaggaatacgctttccaggaatgccgctttccaggaatgctttttccaggaatgatctttccaggaatacgctttccaggaa

SEQ ID NO: 7365 - DNA, 146 bp, synthetic construct
  source 1..146: mol_type = other DNA
ttcctggaatacgctttcctggaatgccgctttcctggaatgctttttcctggaatgatctttcctggaatacgctttcctggaatgccgctttcctggaatgctttttcctggaatgatctttcctggaatacgctttcctggaa

SEQ ID NO: 7366 - DNA, 146 bp, synthetic construct
  source 1..146: mol_type = other DNA
ttcccagaatacgctttcccagaatgccgctttcccagaatgctttttcccagaatgatctttcccagaatacgctttcccagaatgccgctttcccagaatgctttttcccagaatgatctttcccagaatacgctttcccagaa

SEQ ID NO: 7367 - DNA, 146 bp, synthetic construct
  source 1..146: mol_type = other DNA
ttctgggaatacgctttctgggaatgccgctttctgggaatgctttttctgggaatgatctttctgggaatacgctttctgggaatgccgctttctgggaatgctttttctgggaatgatctttctgggaatacgctttctgggaa

SEQ ID NO: 7368 - DNA, 146 bp, synthetic construct
  source 1..146: mol_type = other DNA
ttcccggaatacgctttcccggaatgccgctttcccggaatgctttttcccggaatgatctttcccggaatacgctttcccggaatgccgctttcccggaatgctttttcccggaatgatctttcccggaatacgctttcccggaa

SEQ ID NO: 7369 - DNA, 146 bp, synthetic construct
  source 1..146: mol_type = other DNA
ttccgggaatacgctttccgggaatgccgctttccgggaatgctttttccgggaatgatctttccgggaatacgctttccgggaatgccgctttccgggaatgctttttccgggaatgatctttccgggaatacgctttccgggaa

SEQ ID NO: 7370 - DNA, 146 bp, synthetic construct
  source 1..146: mol_type = other DNA
ttctaagaatacgctttctaagaatgccgctttctaagaatgctttttctaagaatgatctttctaagaatacgctttctaagaatgccgctttctaagaatgctttttctaagaatgatctttctaagaatacgctttctaagaa

SEQ ID NO: 7371 - DNA, 146 bp, synthetic construct
  source 1..146: mol_type = other DNA
ttcttagaatacgctttcttagaatgccgctttcttagaatgctttttcttagaatgatctttcttagaatacgctttcttagaatgccgctttcttagaatgctttttcttagaatgatctttcttagaatacgctttcttagaa

SEQ ID NO: 7372 - DNA, 146 bp, synthetic construct
  source 1..146: mol_type = other DNA
ttctaggaatacgctttctaggaatgccgctttctaggaatgctttttctaggaatgatctttctaggaatacgctttctaggaatgccgctttctaggaatgctttttctaggaatgatctttctaggaatacgctttctaggaa

SEQ ID NO: 7373 - DNA, 146 bp, synthetic construct
  source 1..146: mol_type = other DNA
ttcctagaatacgctttcctagaatgccgctttcctagaatgctttttcctagaatgatctttcctagaatacgctttcctagaatgccgctttcctagaatgctttttcctagaatgatctttcctagaatacgctttcctagaa

SEQ ID NO: 7374 - DNA, 146 bp, synthetic construct
  source 1..146: mol_type = other DNA
ttctcagaatacgctttctcagaatgccgctttctcagaatgctttttctcagaatgatctttctcagaatacgctttctcagaatgccgctttctcagaatgctttttctcagaatgatctttctcagaatacgctttctcagaa

SEQ ID NO: 7375 - DNA, 146 bp, synthetic construct
  source 1..146: mol_type = other DNA
ttctgagaatacgctttctgagaatgccgctttctgagaatgctttttctgagaatgatctttctgagaatacgctttctgagaatgccgctttctgagaatgctttttctgagaatgatctttctgagaatacgctttctgagaa

SEQ ID NO: 7376 - DNA, 146 bp, synthetic construct
  source 1..146: mol_type = other DNA
ttctcggaatacgctttctcggaatgccgctttctcggaatgctttttctcggaatgatctttctcggaatacgctttctcggaatgccgctttctcggaatgctttttctcggaatgatctttctcggaatacgctttctcggaa

SEQ ID NO: 7377 - DNA, 146 bp, synthetic construct
  source 1..146: mol_type = other DNA
ttccgagaatacgctttccgagaatgccgctttccgagaatgctttttccgagaatgatctttccgagaatacgctttccgagaatgccgctttccgagaatgctttttccgagaatgatctttccgagaatacgctttccgagaa

SEQ ID NO: 7378 - DNA, 139 bp, synthetic construct
  source 1..139: mol_type = other DNA
gtgggaaagccttgctttgtgggaaagccttgatctgtgggaaagccttacgctgtgggaaagccttgccgctgtgggaaagccttgctttgtgggaaagccttgatctgtgggaaagccttacgctgtgggaaagcct

SEQ ID NO: 7379 - DNA, 139 bp, synthetic construct
  source 1..139: mol_type = other DNA
aggctttcccactgctttaggctttcccactgatctaggctttcccactacgctaggctttcccactgccgctaggctttcccactgctttaggctttcccactgatctaggctttcccactacgctaggctttcccac

SEQ ID NO: 7380 - DNA, 125 bp, synthetic construct
  source 1..125: mol_type = other DNA
ccccgccccctcccccaccctgccgctccccgccccctcccccaccctgctttccccgccccctcccccaccctgatctccccgccccctcccccaccctacgctccccgccccctcccccaccc

SEQ ID NO: 7381 - DNA, 125 bp, synthetic construct
  source 1..125: mol_type = other DNA
gggtgggggagggggcggggtgccgctgggtgggggagggggcggggtgctttgggtgggggagggggcggggtgatctgggtgggggagggggcggggtacgctgggtgggggagggggcgggg

SEQ ID NO: 7382 - DNA, 125 bp, synthetic construct
  source 1..125: mol_type = other DNA
ccccgccccctcccccaccttgccgctccccgccccctcccccaccttgctttccccgccccctcccccaccttgatctccccgccccctcccccaccttacgctccccgccccctcccccacct

SEQ ID NO: 7383 - DNA, 125 bp, synthetic construct
  source 1..125: mol_type = other DNA
aggtgggggagggggcggggtgccgctaggtgggggagggggcggggtgctttaggtgggggagggggcggggtgatctaggtgggggagggggcggggtacgctaggtgggggagggggcgggg

SEQ ID NO: 7384 - DNA, 125 bp, synthetic construct
  source 1..125: mol_type = other DNA
ccccgcctcctcccccaccctgccgctccccgcctcctcccccaccctgctttccccgcctcctcccccaccctgatctccccgcctcctcccccaccctacgctccccgcctcctcccccaccc

SEQ ID NO: 7385 - DNA, 125 bp, synthetic construct
  source 1..125: mol_type = other DNA
gggtgggggaggaggcggggtgccgctgggtgggggaggaggcggggtgctttgggtgggggaggaggcggggtgatctgggtgggggaggaggcggggtacgctgggtgggggaggaggcgggg

SEQ ID NO: 7386 - DNA, 125 bp, synthetic construct
  source 1..125: mol_type = other DNA
ccccgcctcctcccccaccttgccgctccccgcctcctcccccaccttgctttccccgcctcctcccccaccttgatctccccgcctcctcccccaccttacgctccccgcctcctcccccacct

SEQ ID NO: 7387 - DNA, 125 bp, synthetic construct
  source 1..125: mol_type = other DNA
aggtgggggaggaggcggggtgccgctaggtgggggaggaggcggggtgctttaggtgggggaggaggcggggtgatctaggtgggggaggaggcggggtacgctaggtgggggaggaggcgggg

SEQ ID NO: 7388 - DNA, 125 bp, synthetic construct
  source 1..125: mol_type = other DNA
ctccgccccctcccccaccctgccgctctccgccccctcccccaccctgctttctccgccccctcccccaccctgatctctccgccccctcccccaccctacgctctccgccccctcccccaccc

SEQ ID NO: 7389 - DNA, 125 bp, synthetic construct
  source 1..125: mol_type = other DNA
gggtgggggagggggcggagtgccgctgggtgggggagggggcggagtgctttgggtgggggagggggcggagtgatctgggtgggggagggggcggagtacgctgggtgggggagggggcggag

SEQ ID NO: 7390 - DNA, 125 bp, synthetic construct
  source 1..125: mol_type = other DNA
ctccgccccctcccccaccttgccgctctccgccccctcccccaccttgctttctccgccccctcccccaccttgatctctccgccccctcccccaccttacgctctccgccccctcccccacct

SEQ ID NO: 7391 - DNA, 125 bp, synthetic construct
  source 1..125: mol_type = other DNA
aggtgggggagggggcggagtgccgctaggtgggggagggggcggagtgctttaggtgggggagggggcggagtgatctaggtgggggagggggcggagtacgctaggtgggggagggggcggag

SEQ ID NO: 7392 - DNA, 125 bp, synthetic construct
  source 1..125: mol_type = other DNA
ctccgcctcctcccccaccctgccgctctccgcctcctcccccaccctgctttctccgcctcctcccccaccctgatctctccgcctcctcccccaccctacgctctccgcctcctcccccaccc

SEQ ID NO: 7393 - DNA, 125 bp, synthetic construct
  source 1..125: mol_type = other DNA
gggtgggggaggaggcggagtgccgctgggtgggggaggaggcggagtgctttgggtgggggaggaggcggagtgatctgggtgggggaggaggcggagtacgctgggtgggggaggaggcggag

SEQ ID NO: 7394 - DNA, 125 bp, synthetic construct
  source 1..125: mol_type = other DNA
ctccgcctcctcccccaccttgccgctctccgcctcctcccccaccttgctttctccgcctcctcccccaccttgatctctccgcctcctcccccaccttacgctctccgcctcctcccccacct

SEQ ID NO: 7395 - DNA, 125 bp, synthetic construct
  source 1..125: mol_type = other DNA
aggtgggggaggaggcggagtgccgctaggtgggggaggaggcggagtgctttaggtgggggaggaggcggagtgatctaggtgggggaggaggcggagtacgctaggtgggggaggaggcggag

SEQ ID NO: 7396 - DNA, 136 bp, synthetic construct
  source 1..136: mol_type = other DNA
ggggggggtacgctggggggggtgccgctggggggggtgctttggggggggtgatctggggggggtacgctggggggggtgccgctggggggggtgctttggggggggtgatctggggggggtacgctgggggggg

SEQ ID NO: 7397 - DNA, 136 bp, synthetic construct
  source 1..136: mol_type = other DNA
cccccccctacgctcccccccctgccgctcccccccctgctttcccccccctgatctcccccccctacgctcccccccctgccgctcccccccctgctttcccccccctgatctcccccccctacgctcccccccc

SEQ ID NO: 7398 - DNA, 140 bp, synthetic construct
  source 1..140: mol_type = other DNA
agctgacaactgccgctagctgacaactgctttagctgacaactgatctagctgacaactacgctagctgacaactgccgctagctgacaactgctttagctgacaactgatctagctgacaactacgctagctgacaac

SEQ ID NO: 7399 - DNA, 140 bp, synthetic construct
  source 1..140: mol_type = other DNA
gttgtcagcttgccgctgttgtcagcttgctttgttgtcagcttgatctgttgtcagcttacgctgttgtcagcttgccgctgttgtcagcttgctttgttgtcagcttgatctgttgtcagcttacgctgttgtcagct

SEQ ID NO: 7400 - DNA, 140 bp, synthetic construct
  source 1..140: mol_type = other DNA
agctgacaagtgccgctagctgacaagtgctttagctgacaagtgatctagctgacaagtacgctagctgacaagtgccgctagctgacaagtgctttagctgacaagtgatctagctgacaagtacgctagctgacaag

SEQ ID NO: 7401 - DNA, 140 bp, synthetic construct
  source 1..140: mol_type = other DNA
cttgtcagcttgccgctcttgtcagcttgctttcttgtcagcttgatctcttgtcagcttacgctcttgtcagcttgccgctcttgtcagcttgctttcttgtcagcttgatctcttgtcagcttacgctcttgtcagct

SEQ ID NO: 7402 - DNA, 140 bp, synthetic construct
  source 1..140: mol_type = other DNA
agctgacaattgccgctagctgacaattgctttagctgacaattgatctagctgacaattacgctagctgacaattgccgctagctgacaattgctttagctgacaattgatctagctgacaattacgctagctgacaat

SEQ ID NO: 7403 - DNA, 140 bp, synthetic construct
  source 1..140: mol_type = other DNA
attgtcagcttgccgctattgtcagcttgctttattgtcagcttgatctattgtcagcttacgctattgtcagcttgccgctattgtcagcttgctttattgtcagcttgatctattgtcagcttacgctattgtcagct

SEQ ID NO: 7404 - DNA, 140 bp, synthetic construct
  source 1..140: mol_type = other DNA
agctgacacctgccgctagctgacacctgctttagctgacacctgatctagctgacacctacgctagctgacacctgccgctagctgacacctgctttagctgacacctgatctagctgacacctacgctagctgacacc

SEQ ID NO: 7405 - DNA, 140 bp, synthetic construct
  source 1..140: mol_type = other DNA
ggtgtcagcttgccgctggtgtcagcttgctttggtgtcagcttgatctggtgtcagcttacgctggtgtcagcttgccgctggtgtcagcttgctttggtgtcagcttgatctggtgtcagcttacgctggtgtcagct

SEQ ID NO: 7406 - DNA, 140 bp, synthetic construct
  source 1..140: mol_type = other DNA
agctgacacgtgccgctagctgacacgtgctttagctgacacgtgatctagctgacacgtacgctagctgacacgtgccgctagctgacacgtgctttagctgacacgtgatctagctgacacgtacgctagctgacacg

SEQ ID NO: 7407 - DNA, 140 bp, synthetic construct
  source 1..140: mol_type = other DNA
cgtgtcagcttgccgctcgtgtcagcttgctttcgtgtcagcttgatctcgtgtcagcttacgctcgtgtcagcttgccgctcgtgtcagcttgctttcgtgtcagcttgatctcgtgtcagcttacgctcgtgtcagct

SEQ ID NO: 7408 - DNA, 140 bp, synthetic construct
  source 1..140: mol_type = other DNA
agctgacacttgccgctagctgacacttgctttagctgacacttgatctagctgacacttacgctagctgacacttgccgctagctgacacttgctttagctgacacttgatctagctgacacttacgctagctgacact

SEQ ID NO: 7409 - DNA, 140 bp, synthetic construct
  source 1..140: mol_type = other DNA
agtgtcagcttgccgctagtgtcagcttgctttagtgtcagcttgatctagtgtcagcttacgctagtgtcagcttgccgctagtgtcagcttgctttagtgtcagcttgatctagtgtcagcttacgctagtgtcagct

SEQ ID NO: 7410 - DNA, 140 bp, synthetic construct
  source 1..140: mol_type = other DNA
agctgacagctgccgctagctgacagctgctttagctgacagctgatctagctgacagctacgctagctgacagctgccgctagctgacagctgctttagctgacagctgatctagctgacagctacgctagctgacagc

SEQ ID NO: 7411 - DNA, 140 bp, synthetic construct
  source 1..140: mol_type = other DNA
gctgtcagcttgccgctgctgtcagcttgctttgctgtcagcttgatctgctgtcagcttacgctgctgtcagcttgccgctgctgtcagcttgctttgctgtcagcttgatctgctgtcagcttacgctgctgtcagct

SEQ ID NO: 7412 - DNA, 140 bp, synthetic construct
  source 1..140: mol_type = other DNA
agctgacaggtgccgctagctgacaggtgctttagctgacaggtgatctagctgacaggtacgctagctgacaggtgccgctagctgacaggtgctttagctgacaggtgatctagctgacaggtacgctagctgacagg

SEQ ID NO: 7413 - DNA, 140 bp, synthetic construct
  source 1..140: mol_type = other DNA
cctgtcagcttgccgctcctgtcagcttgctttcctgtcagcttgatctcctgtcagcttacgctcctgtcagcttgccgctcctgtcagcttgctttcctgtcagcttgatctcctgtcagcttacgctcctgtcagct

SEQ ID NO: 7414 - DNA, 140 bp, synthetic construct
  source 1..140: mol_type = other DNA
agctgacagttgccgctagctgacagttgctttagctgacagttgatctagctgacagttacgctagctgacagttgccgctagctgacagttgctttagctgacagttgatctagctgacagttacgctagctgacagt

SEQ ID NO: 7415 - DNA, 140 bp, synthetic construct
  source 1..140: mol_type = other DNA
actgtcagcttgccgctactgtcagcttgctttactgtcagcttgatctactgtcagcttacgctactgtcagcttgccgctactgtcagcttgctttactgtcagcttgatctactgtcagcttacgctactgtcagct

SEQ ID NO: 7416 - DNA, 140 bp, synthetic construct
  source 1..140: mol_type = other DNA
agctgtcaactgccgctagctgtcaactgctttagctgtcaactgatctagctgtcaactacgctagctgtcaactgccgctagctgtcaactgctttagctgtcaactgatctagctgtcaactacgctagctgtcaac

SEQ ID NO: 7417 - DNA, 140 bp, synthetic construct
  source 1..140: mol_type = other DNA
gttgacagcttgccgctgttgacagcttgctttgttgacagcttgatctgttgacagcttacgctgttgacagcttgccgctgttgacagcttgctttgttgacagcttgatctgttgacagcttacgctgttgacagct

SEQ ID NO: 7418 - DNA, 140 bp, synthetic construct
  source 1..140: mol_type = other DNA
agctgtcaagtgccgctagctgtcaagtgctttagctgtcaagtgatctagctgtcaagtacgctagctgtcaagtgccgctagctgtcaagtgctttagctgtcaagtgatctagctgtcaagtacgctagctgtcaag

SEQ ID NO: 7419 - DNA, 140 bp, synthetic construct
  source 1..140: mol_type = other DNA
cttgacagcttgccgctcttgacagcttgctttcttgacagcttgatctcttgacagcttacgctcttgacagcttgccgctcttgacagcttgctttcttgacagcttgatctcttgacagcttacgctcttgacagct

SEQ ID NO: 7420 - DNA, 140 bp, synthetic construct
  source 1..140: mol_type = other DNA
agctgtcaattgccgctagctgtcaattgctttagctgtcaattgatctagctgtcaattacgctagctgtcaattgccgctagctgtcaattgctttagctgtcaattgatctagctgtcaattacgctagctgtcaat

SEQ ID NO: 7421 - DNA, 140 bp, synthetic construct
  source 1..140: mol_type = other DNA
attgacagcttgccgctattgacagcttgctttattgacagcttgatctattgacagcttacgctattgacagcttgccgctattgacagcttgctttattgacagcttgatctattgacagcttacgctattgacagct

SEQ ID NO: 7422 - DNA, 140 bp, synthetic construct
  source 1..140: mol_type = other DNA
agctgtcacctgccgctagctgtcacctgctttagctgtcacctgatctagctgtcacctacgctagctgtcacctgccgctagctgtcacctgctttagctgtcacctgatctagctgtcacctacgctagctgtcacc

SEQ ID NO: 7423 - DNA, 140 bp, synthetic construct
  source 1..140: mol_type = other DNA
ggtgacagcttgccgctggtgacagcttgctttggtgacagcttgatctggtgacagcttacgctggtgacagcttgccgctggtgacagcttgctttggtgacagcttgatctggtgacagcttacgctggtgacagct

SEQ ID NO: 7424 - DNA, 140 bp, synthetic construct
  source 1..140: mol_type = other DNA
agctgtcacgtgccgctagctgtcacgtgctttagctgtcacgtgatctagctgtcacgtacgctagctgtcacgtgccgctagctgtcacgtgctttagctgtcacgtgatctagctgtcacgtacgctagctgtcacg

SEQ ID NO: 7425 - DNA, 140 bp, synthetic construct
  source 1..140: mol_type = other DNA
cgtgacagcttgccgctcgtgacagcttgctttcgtgacagcttgatctcgtgacagcttacgctcgtgacagcttgccgctcgtgacagcttgctttcgtgacagcttgatctcgtgacagcttacgctcgtgacagct

SEQ ID NO: 7426 - DNA, 140 bp, synthetic construct
  source 1..140: mol_type = other DNA
agctgtcacttgccgctagctgtcacttgctttagctgtcacttgatctagctgtcacttacgctagctgtcacttgccgctagctgtcacttgctttagctgtcacttgatctagctgtcacttacgctagctgtcact

SEQ ID NO: 7427 - DNA, 140 bp, synthetic construct
  source 1..140: mol_type = other DNA
agtgacagcttgccgctagtgacagcttgctttagtgacagcttgatctagtgacagcttacgctagtgacagcttgccgctagtgacagcttgctttagtgacagcttgatctagtgacagcttacgctagtgacagct

SEQ ID NO: 7428 - DNA, 140 bp, synthetic construct
  source 1..140: mol_type = other DNA
agctgtcagctgccgctagctgtcagctgctttagctgtcagctgatctagctgtcagctacgctagctgtcagctgccgctagctgtcagctgctttagctgtcagctgatctagctgtcagctacgctagctgtcagc

SEQ ID NO: 7429 - DNA, 140 bp, synthetic construct
  source 1..140: mol_type = other DNA
gctgacagcttgccgctgctgacagcttgctttgctgacagcttgatctgctgacagcttacgctgctgacagcttgccgctgctgacagcttgctttgctgacagcttgatctgctgacagcttacgctgctgacagct

SEQ ID NO: 7430 - DNA, 140 bp, synthetic construct
  source 1..140: mol_type = other DNA
agctgtcaggtgccgctagctgtcaggtgctttagctgtcaggtgatctagctgtcaggtacgctagctgtcaggtgccgctagctgtcaggtgctttagctgtcaggtgatctagctgtcaggtacgctagctgtcagg

SEQ ID NO: 7431 - DNA, 140 bp, synthetic construct
  source 1..140: mol_type = other DNA
cctgacagcttgccgctcctgacagcttgctttcctgacagcttgatctcctgacagcttacgctcctgacagcttgccgctcctgacagcttgctttcctgacagcttgatctcctgacagcttacgctcctgacagct

SEQ ID NO: 7432 - DNA, 140 bp, synthetic construct
  source 1..140: mol_type = other DNA
agctgtcagttgccgctagctgtcagttgctttagctgtcagttgatctagctgtcagttacgctagctgtcagttgccgctagctgtcagttgctttagctgtcagttgatctagctgtcagttacgctagctgtcagt

SEQ ID NO: 7433 - DNA, 140 bp, synthetic construct
  source 1..140: mol_type = other DNA
actgacagcttgccgctactgacagcttgctttactgacagcttgatctactgacagcttacgctactgacagcttgccgctactgacagcttgctttactgacagcttgatctactgacagcttacgctactgacagct

SEQ ID NO: 7434 - DNA, 140 bp, synthetic construct
  source 1..140: mol_type = other DNA
cgctgacaactgccgctcgctgacaactgctttcgctgacaactgatctcgctgacaactacgctcgctgacaactgccgctcgctgacaactgctttcgctgacaactgatctcgctgacaactacgctcgctgacaac

SEQ ID NO: 7435 - DNA, 140 bp, synthetic construct
  source 1..140: mol_type = other DNA
gttgtcagcgtgccgctgttgtcagcgtgctttgttgtcagcgtgatctgttgtcagcgtacgctgttgtcagcgtgccgctgttgtcagcgtgctttgttgtcagcgtgatctgttgtcagcgtacgctgttgtcagcg

SEQ ID NO: 7436 - DNA, 140 bp, synthetic construct
  source 1..140: mol_type = other DNA
cgctgacaagtgccgctcgctgacaagtgctttcgctgacaagtgatctcgctgacaagtacgctcgctgacaagtgccgctcgctgacaagtgctttcgctgacaagtgatctcgctgacaagtacgctcgctgacaag

SEQ ID NO: 7437 - DNA, 140 bp, synthetic construct
  source 1..140: mol_type = other DNA
cttgtcagcgtgccgctcttgtcagcgtgctttcttgtcagcgtgatctcttgtcagcgtacgctcttgtcagcgtgccgctcttgtcagcgtgctttcttgtcagcgtgatctcttgtcagcgtacgctcttgtcagcg

SEQ ID NO: 7438 - DNA, 140 bp, synthetic construct
  source 1..140: mol_type = other DNA
cgctgacaattgccgctcgctgacaattgctttcgctgacaattgatctcgctgacaattacgctcgctgacaattgccgctcgctgacaattgctttcgctgacaattgatctcgctgacaattacgctcgctgacaat

SEQ ID NO: 7439 - DNA, 140 bp, synthetic construct
  source 1..140: mol_type = other DNA
attgtcagcgtgccgctattgtcagcgtgctttattgtcagcgtgatctattgtcagcgtacgctattgtcagcgtgccgctattgtcagcgtgctttattgtcagcgtgatctattgtcagcgtacgctattgtcagcg

SEQ ID NO: 7440 - DNA, 140 bp, synthetic construct
  source 1..140: mol_type = other DNA
cgctgacacctgccgctcgctgacacctgctttcgctgacacctgatctcgctgacacctacgctcgctgacacctgccgctcgctgacacctgctttcgctgacacctgatctcgctgacacctacgctcgctgacacc

SEQ ID NO: 7441 - DNA, 140 bp, synthetic construct
  source 1..140: mol_type = other DNA
ggtgtcagcgtgccgctggtgtcagcgtgctttggtgtcagcgtgatctggtgtcagcgtacgctggtgtcagcgtgccgctggtgtcagcgtgctttggtgtcagcgtgatctggtgtcagcgtacgctggtgtcagcg

SEQ ID NO: 7442 - DNA, 140 bp, synthetic construct
  source 1..140: mol_type = other DNA
cgctgacacgtgccgctcgctgacacgtgctttcgctgacacgtgatctcgctgacacgtacgctcgctgacacgtgccgctcgctgacacgtgctttcgctgacacgtgatctcgctgacacgtacgctcgctgacacg

SEQ ID NO: 7443 - DNA, 140 bp, synthetic construct
  source 1..140: mol_type = other DNA
cgtgtcagcgtgccgctcgtgtcagcgtgctttcgtgtcagcgtgatctcgtgtcagcgtacgctcgtgtcagcgtgccgctcgtgtcagcgtgctttcgtgtcagcgtgatctcgtgtcagcgtacgctcgtgtcagcg

SEQ ID NO: 7444 - DNA, 140 bp, synthetic construct
  source 1..140: mol_type = other DNA
cgctgacacttgccgctcgctgacacttgctttcgctgacacttgatctcgctgacacttacgctcgctgacacttgccgctcgctgacacttgctttcgctgacacttgatctcgctgacacttacgctcgctgacact

SEQ ID NO: 7445 - DNA, 140 bp, synthetic construct
  source 1..140: mol_type = other DNA
agtgtcagcgtgccgctagtgtcagcgtgctttagtgtcagcgtgatctagtgtcagcgtacgctagtgtcagcgtgccgctagtgtcagcgtgctttagtgtcagcgtgatctagtgtcagcgtacgctagtgtcagcg

SEQ ID NO: 7446 - DNA, 140 bp, synthetic construct
  source 1..140: mol_type = other DNA
cgctgacagctgccgctcgctgacagctgctttcgctgacagctgatctcgctgacagctacgctcgctgacagctgccgctcgctgacagctgctttcgctgacagctgatctcgctgacagctacgctcgctgacagc

SEQ ID NO: 7447 - DNA, 140 bp, synthetic construct
  source 1..140: mol_type = other DNA
gctgtcagcgtgccgctgctgtcagcgtgctttgctgtcagcgtgatctgctgtcagcgtacgctgctgtcagcgtgccgctgctgtcagcgtgctttgctgtcagcgtgatctgctgtcagcgtacgctgctgtcagcg

SEQ ID NO: 7448 - DNA, 140 bp, synthetic construct
  source 1..140: mol_type = other DNA
cgctgacaggtgccgctcgctgacaggtgctttcgctgacaggtgatctcgctgacaggtacgctcgctgacaggtgccgctcgctgacaggtgctttcgctgacaggtgatctcgctgacaggtacgctcgctgacagg

SEQ ID NO: 7449 - DNA, 140 bp, synthetic construct
  source 1..140: mol_type = other DNA
cctgtcagcgtgccgctcctgtcagcgtgctttcctgtcagcgtgatctcctgtcagcgtacgctcctgtcagcgtgccgctcctgtcagcgtgctttcctgtcagcgtgatctcctgtcagcgtacgctcctgtcagcg

SEQ ID NO: 7450 - DNA, 140 bp, synthetic construct
  source 1..140: mol_type = other DNA
cgctgacagttgccgctcgctgacagttgctttcgctgacagttgatctcgctgacagttacgctcgctgacagttgccgctcgctgacagttgctttcgctgacagttgatctcgctgacagttacgctcgctgacagt

SEQ ID NO: 7451 - DNA, 140 bp, synthetic construct
  source 1..140: mol_type = other DNA
actgtcagcgtgccgctactgtcagcgtgctttactgtcagcgtgatctactgtcagcgtacgctactgtcagcgtgccgctactgtcagcgtgctttactgtcagcgtgatctactgtcagcgtacgctactgtcagcg

SEQ ID NO: 7452 - DNA, 140 bp, synthetic construct
  source 1..140: mol_type = other DNA
cgctgtcaactgccgctcgctgtcaactgctttcgctgtcaactgatctcgctgtcaactacgctcgctgtcaactgccgctcgctgtcaactgctttcgctgtcaactgatctcgctgtcaactacgctcgctgtcaac

SEQ ID NO: 7453 - DNA, 140 bp, synthetic construct
  source 1..140: mol_type = other DNA
gttgacagcgtgccgctgttgacagcgtgctttgttgacagcgtgatctgttgacagcgtacgctgttgacagcgtgccgctgttgacagcgtgctttgttgacagcgtgatctgttgacagcgtacgctgttgacagcg

SEQ ID NO: 7454 - DNA, 140 bp, synthetic construct
  source 1..140: mol_type = other DNA
cgctgtcaagtgccgctcgctgtcaagtgctttcgctgtcaagtgatctcgctgtcaagtacgctcgctgtcaagtgccgctcgctgtcaagtgctttcgctgtcaagtgatctcgctgtcaagtacgctcgctgtcaag

SEQ ID NO: 7455 - DNA, 140 bp, synthetic construct
  source 1..140: mol_type = other DNA
cttgacagcgtgccgctcttgacagcgtgctttcttgacagcgtgatctcttgacagcgtacgctcttgacagcgtgccgctcttgacagcgtgctttcttgacagcgtgatctcttgacagcgtacgctcttgacagcg

SEQ ID NO: 7456 - DNA, 140 bp, synthetic construct
  source 1..140: mol_type = other DNA
cgctgtcaattgccgctcgctgtcaattgctttcgctgtcaattgatctcgctgtcaattacgctcgctgtcaattgccgctcgctgtcaattgctttcgctgtcaattgatctcgctgtcaattacgctcgctgtcaat

SEQ ID NO: 7457 - DNA, 140 bp, synthetic construct
  source 1..140: mol_type = other DNA
attgacagcgtgccgctattgacagcgtgctttattgacagcgtgatctattgacagcgtacgctattgacagcgtgccgctattgacagcgtgctttattgacagcgtgatctattgacagcgtacgctattgacagcg

SEQ ID NO: 7458 - DNA, 140 bp, synthetic construct
  source 1..140: mol_type = other DNA
cgctgtcacctgccgctcgctgtcacctgctttcgctgtcacctgatctcgctgtcacctacgctcgctgtcacctgccgctcgctgtcacctgctttcgctgtcacctgatctcgctgtcacctacgctcgctgtcacc

SEQ ID NO: 7459 - DNA, 140 bp, synthetic construct
  source 1..140: mol_type = other DNA
ggtgacagcgtgccgctggtgacagcgtgctttggtgacagcgtgatctggtgacagcgtacgctggtgacagcgtgccgctggtgacagcgtgctttggtgacagcgtgatctggtgacagcgtacgctggtgacagcg

SEQ ID NO: 7460 - DNA, 140 bp, synthetic construct
  source 1..140: mol_type = other DNA
cgctgtcacgtgccgctcgctgtcacgtgctttcgctgtcacgtgatctcgctgtcacgtacgctcgctgtcacgtgccgctcgctgtcacgtgctttcgctgtcacgtgatctcgctgtcacgtacgctcgctgtcacg

SEQ ID NO: 7461 - DNA, 140 bp, synthetic construct
  source 1..140: mol_type = other DNA
cgtgacagcgtgccgctcgtgacagcgtgctttcgtgacagcgtgatctcgtgacagcgtacgctcgtgacagcgtgccgctcgtgacagcgtgctttcgtgacagcgtgatctcgtgacagcgtacgctcgtgacagcg

SEQ ID NO: 7462 - DNA, 140 bp, synthetic construct
  source 1..140: mol_type = other DNA
cgctgtcacttgccgctcgctgtcacttgctttcgctgtcacttgatctcgctgtcacttacgctcgctgtcacttgccgctcgctgtcacttgctttcgctgtcacttgatctcgctgtcacttacgctcgctgtcact

SEQ ID NO: 7463 - DNA, 140 bp, synthetic construct
  source 1..140: mol_type = other DNA
agtgacagcgtgccgctagtgacagcgtgctttagtgacagcgtgatctagtgacagcgtacgctagtgacagcgtgccgctagtgacagcgtgctttagtgacagcgtgatctagtgacagcgtacgctagtgacagcg

SEQ ID NO: 7464 - DNA, 140 bp, synthetic construct
  source 1..140: mol_type = other DNA
cgctgtcagctgccgctcgctgtcagctgctttcgctgtcagctgatctcgctgtcagctacgctcgctgtcagctgccgctcgctgtcagctgctttcgctgtcagctgatctcgctgtcagctacgctcgctgtcagc

SEQ ID NO: 7465 - DNA, 140 bp, synthetic construct
  source 1..140: mol_type = other DNA
gctgacagcgtgccgctgctgacagcgtgctttgctgacagcgtgatctgctgacagcgtacgctgctgacagcgtgccgctgctgacagcgtgctttgctgacagcgtgatctgctgacagcgtacgctgctgacagcg

SEQ ID NO: 7466 - DNA, 140 bp, synthetic construct
  source 1..140: mol_type = other DNA
cgctgtcaggtgccgctcgctgtcaggtgctttcgctgtcaggtgatctcgctgtcaggtacgctcgctgtcaggtgccgctcgctgtcaggtgctttcgctgtcaggtgatctcgctgtcaggtacgctcgctgtcagg

SEQ ID NO: 7467 - DNA, 140 bp, synthetic construct
  source 1..140: mol_type = other DNA
cctgacagcgtgccgctcctgacagcgtgctttcctgacagcgtgatctcctgacagcgtacgctcctgacagcgtgccgctcctgacagcgtgctttcctgacagcgtgatctcctgacagcgtacgctcctgacagcg

SEQ ID NO: 7468 - DNA, 140 bp, synthetic construct
  source 1..140: mol_type = other DNA
cgctgtcagttgccgctcgctgtcagttgctttcgctgtcagttgatctcgctgtcagttacgctcgctgtcagttgccgctcgctgtcagttgctttcgctgtcagttgatctcgctgtcagttacgctcgctgtcagt

SEQ ID NO: 7469 - DNA, 140 bp, synthetic construct
  source 1..140: mol_type = other DNA
actgacagcgtgccgctactgacagcgtgctttactgacagcgtgatctactgacagcgtacgctactgacagcgtgccgctactgacagcgtgctttactgacagcgtgatctactgacagcgtacgctactgacagcg

SEQ ID NO: 7470 - DNA, 140 bp, synthetic construct
  source 1..140: mol_type = other DNA
ggctgacaactgccgctggctgacaactgctttggctgacaactgatctggctgacaactacgctggctgacaactgccgctggctgacaactgctttggctgacaactgatctggctgacaactacgctggctgacaac

SEQ ID NO: 7471 - DNA, 140 bp, synthetic construct
  source 1..140: mol_type = other DNA
gttgtcagcctgccgctgttgtcagcctgctttgttgtcagcctgatctgttgtcagcctacgctgttgtcagcctgccgctgttgtcagcctgctttgttgtcagcctgatctgttgtcagcctacgctgttgtcagcc

SEQ ID NO: 7472 - DNA, 140 bp, synthetic construct
  source 1..140: mol_type = other DNA
ggctgacaagtgccgctggctgacaagtgctttggctgacaagtgatctggctgacaagtacgctggctgacaagtgccgctggctgacaagtgctttggctgacaagtgatctggctgacaagtacgctggctgacaag

SEQ ID NO: 7473 - DNA, 140 bp, synthetic construct
  source 1..140: mol_type = other DNA
cttgtcagcctgccgctcttgtcagcctgctttcttgtcagcctgatctcttgtcagcctacgctcttgtcagcctgccgctcttgtcagcctgctttcttgtcagcctgatctcttgtcagcctacgctcttgtcagcc

SEQ ID NO: 7474 - DNA, 140 bp, synthetic construct
  source 1..140: mol_type = other DNA
ggctgacaattgccgctggctgacaattgctttggctgacaattgatctggctgacaattacgctggctgacaattgccgctggctgacaattgctttggctgacaattgatctggctgacaattacgctggctgacaat

SEQ ID NO: 7475 - DNA, 140 bp, synthetic construct
  source 1..140: mol_type = other DNA
attgtcagcctgccgctattgtcagcctgctttattgtcagcctgatctattgtcagcctacgctattgtcagcctgccgctattgtcagcctgctttattgtcagcctgatctattgtcagcctacgctattgtcagcc

SEQ ID NO: 7476 - DNA, 140 bp, synthetic construct
  source 1..140: mol_type = other DNA
ggctgacacctgccgctggctgacacctgctttggctgacacctgatctggctgacacctacgctggctgacacctgccgctggctgacacctgctttggctgacacctgatctggctgacacctacgctggctgacacc

SEQ ID NO: 7477 - DNA, 140 bp, synthetic construct
  source 1..140: mol_type = other DNA
ggtgtcagcctgccgctggtgtcagcctgctttggtgtcagcctgatctggtgtcagcctacgctggtgtcagcctgccgctggtgtcagcctgctttggtgtcagcctgatctggtgtcagcctacgctggtgtcagcc

SEQ ID NO: 7478 - DNA, 140 bp, synthetic construct
  source 1..140: mol_type = other DNA
ggctgacacgtgccgctggctgacacgtgctttggctgacacgtgatctggctgacacgtacgctggctgacacgtgccgctggctgacacgtgctttggctgacacgtgatctggctgacacgtacgctggctgacacg

SEQ ID NO: 7479 - DNA, 140 bp, synthetic construct
  source 1..140: mol_type = other DNA
cgtgtcagcctgccgctcgtgtcagcctgctttcgtgtcagcctgatctcgtgtcagcctacgctcgtgtcagcctgccgctcgtgtcagcctgctttcgtgtcagcctgatctcgtgtcagcctacgctcgtgtcagcc

SEQ ID NO: 7480 - DNA, 140 bp, synthetic construct
  source 1..140: mol_type = other DNA
ggctgacacttgccgctggctgacacttgctttggctgacacttgatctggctgacacttacgctggctgacacttgccgctggctgacacttgctttggctgacacttgatctggctgacacttacgctggctgacact

SEQ ID NO: 7481 - DNA, 140 bp, synthetic construct
  source 1..140: mol_type = other DNA
agtgtcagcctgccgctagtgtcagcctgctttagtgtcagcctgatctagtgtcagcctacgctagtgtcagcctgccgctagtgtcagcctgctttagtgtcagcctgatctagtgtcagcctacgctagtgtcagcc

SEQ ID NO: 7482 - DNA, 140 bp, synthetic construct
  source 1..140: mol_type = other DNA
ggctgacagctgccgctggctgacagctgctttggctgacagctgatctggctgacagctacgctggctgacagctgccgctggctgacagctgctttggctgacagctgatctggctgacagctacgctggctgacagc

SEQ ID NO: 7483 - DNA, 140 bp, synthetic construct
  source 1..140: mol_type = other DNA
gctgtcagcctgccgctgctgtcagcctgctttgctgtcagcctgatctgctgtcagcctacgctgctgtcagcctgccgctgctgtcagcctgctttgctgtcagcctgatctgctgtcagcctacgctgctgtcagcc

SEQ ID NO: 7484 - DNA, 140 bp, synthetic construct
  source 1..140: mol_type = other DNA
ggctgacaggtgccgctggctgacaggtgctttggctgacaggtgatctggctgacaggtacgctggctgacaggtgccgctggctgacaggtgctttggctgacaggtgatctggctgacaggtacgctggctgacagg

SEQ ID NO: 7485 - DNA, 140 bp, synthetic construct
  source 1..140: mol_type = other DNA
cctgtcagcctgccgctcctgtcagcctgctttcctgtcagcctgatctcctgtcagcctacgctcctgtcagcctgccgctcctgtcagcctgctttcctgtcagcctgatctcctgtcagcctacgctcctgtcagcc

SEQ ID NO: 7486 - DNA, 140 bp, synthetic construct
  source 1..140: mol_type = other DNA
ggctgacagttgccgctggctgacagttgctttggctgacagttgatctggctgacagttacgctggctgacagttgccgctggctgacagttgctttggctgacagttgatctggctgacagttacgctggctgacagt

SEQ ID NO: 7487 - DNA, 140 bp, synthetic construct
  source 1..140: mol_type = other DNA
actgtcagcctgccgctactgtcagcctgctttactgtcagcctgatctactgtcagcctacgctactgtcagcctgccgctactgtcagcctgctttactgtcagcctgatctactgtcagcctacgctactgtcagcc

SEQ ID NO: 7488 - DNA, 140 bp, synthetic construct
  source 1..140: mol_type = other DNA
ggctgtcaactgccgctggctgtcaactgctttggctgtcaactgatctggctgtcaactacgctggctgtcaactgccgctggctgtcaactgctttggctgtcaactgatctggctgtcaactacgctggctgtcaac

SEQ ID NO: 7489 - DNA, 140 bp, synthetic construct
  source 1..140: mol_type = other DNA
gttgacagcctgccgctgttgacagcctgctttgttgacagcctgatctgttgacagcctacgctgttgacagcctgccgctgttgacagcctgctttgttgacagcctgatctgttgacagcctacgctgttgacagcc

SEQ ID NO: 7490 - DNA, 140 bp, synthetic construct
  source 1..140: mol_type = other DNA
ggctgtcaagtgccgctggctgtcaagtgctttggctgtcaagtgatctggctgtcaagtacgctggctgtcaagtgccgctggctgtcaagtgctttggctgtcaagtgatctggctgtcaagtacgctggctgtcaag

SEQ ID NO: 7491 - DNA, 140 bp, synthetic construct
  source 1..140: mol_type = other DNA
cttgacagcctgccgctcttgacagcctgctttcttgacagcctgatctcttgacagcctacgctcttgacagcctgccgctcttgacagcctgctttcttgacagcctgatctcttgacagcctacgctcttgacagcc

SEQ ID NO: 7492 - DNA, 140 bp, synthetic construct
  source 1..140: mol_type = other DNA
ggctgtcaattgccgctggctgtcaattgctttggctgtcaattgatctggctgtcaattacgctggctgtcaattgccgctggctgtcaattgctttggctgtcaattgatctggctgtcaattacgctggctgtcaat

SEQ ID NO: 7493 - DNA, 140 bp, synthetic construct
  source 1..140: mol_type = other DNA
attgacagcctgccgctattgacagcctgctttattgacagcctgatctattgacagcctacgctattgacagcctgccgctattgacagcctgctttattgacagcctgatctattgacagcctacgctattgacagcc

SEQ ID NO: 7494 - DNA, 140 bp, synthetic construct
  source 1..140: mol_type = other DNA
ggctgtcacctgccgctggctgtcacctgctttggctgtcacctgatctggctgtcacctacgctggctgtcacctgccgctggctgtcacctgctttggctgtcacctgatctggctgtcacctacgctggctgtcacc

SEQ ID NO: 7495 - DNA, 140 bp, synthetic construct
  source 1..140: mol_type = other DNA
ggtgacagcctgccgctggtgacagcctgctttggtgacagcctgatctggtgacagcctacgctggtgacagcctgccgctggtgacagcctgctttggtgacagcctgatctggtgacagcctacgctggtgacagcc

SEQ ID NO: 7496 - DNA, 140 bp, synthetic construct
  source 1..140: mol_type = other DNA
ggctgtcacgtgccgctggctgtcacgtgctttggctgtcacgtgatctggctgtcacgtacgctggctgtcacgtgccgctggctgtcacgtgctttggctgtcacgtgatctggctgtcacgtacgctggctgtcacg

SEQ ID NO: 7497 - DNA, 140 bp, synthetic construct
  source 1..140: mol_type = other DNA
cgtgacagcctgccgctcgtgacagcctgctttcgtgacagcctgatctcgtgacagcctacgctcgtgacagcctgccgctcgtgacagcctgctttcgtgacagcctgatctcgtgacagcctacgctcgtgacagcc

SEQ ID NO: 7498 - DNA, 140 bp, synthetic construct
  source 1..140: mol_type = other DNA
ggctgtcacttgccgctggctgtcacttgctttggctgtcacttgatctggctgtcacttacgctggctgtcacttgccgctggctgtcacttgctttggctgtcacttgatctggctgtcacttacgctggctgtcact

SEQ ID NO: 7499 - DNA, 140 bp, synthetic construct
  source 1..140: mol_type = other DNA
agtgacagcctgccgctagtgacagcctgctttagtgacagcctgatctagtgacagcctacgctagtgacagcctgccgctagtgacagcctgctttagtgacagcctgatctagtgacagcctacgctagtgacagcc

SEQ ID NO: 7500 - DNA, 140 bp, synthetic construct
  source 1..140: mol_type = other DNA
ggctgtcagctgccgctggctgtcagctgctttggctgtcagctgatctggctgtcagctacgctggctgtcagctgccgctggctgtcagctgctttggctgtcagctgatctggctgtcagctacgctggctgtcagc

SEQ ID NO: 7501 - DNA, 140 bp, synthetic construct
  source 1..140: mol_type = other DNA
gctgacagcctgccgctgctgacagcctgctttgctgacagcctgatctgctgacagcctacgctgctgacagcctgccgctgctgacagcctgctttgctgacagcctgatctgctgacagcctacgctgctgacagcc

SEQ ID NO: 7502 - DNA, 140 bp, synthetic construct
  source 1..140: mol_type = other DNA
ggctgtcaggtgccgctggctgtcaggtgctttggctgtcaggtgatctggctgtcaggtacgctggctgtcaggtgccgctggctgtcaggtgctttggctgtcaggtgatctggctgtcaggtacgctggctgtcagg

SEQ ID NO: 7503 - DNA, 140 bp, synthetic construct
  source 1..140: mol_type = other DNA
cctgacagcctgccgctcctgacagcctgctttcctgacagcctgatctcctgacagcctacgctcctgacagcctgccgctcctgacagcctgctttcctgacagcctgatctcctgacagcctacgctcctgacagcc

SEQ ID NO: 7504 - DNA, 140 bp, synthetic construct
  source 1..140: mol_type = other DNA
ggctgtcagttgccgctggctgtcagttgctttggctgtcagttgatctggctgtcagttacgctggctgtcagttgccgctggctgtcagttgctttggctgtcagttgatctggctgtcagttacgctggctgtcagt

SEQ ID NO: 7505 - DNA, 140 bp, synthetic construct
  source 1..140: mol_type = other DNA
actgacagcctgccgctactgacagcctgctttactgacagcctgatctactgacagcctacgctactgacagcctgccgctactgacagcctgctttactgacagcctgatctactgacagcctacgctactgacagcc

SEQ ID NO: 7506 - DNA, 139 bp, synthetic construct
  source 1..139: mol_type = other DNA
ggcttccagccctgctttggcttccagccctgatctggcttccagccctacgctggcttccagccctgccgctggcttccagccctgctttggcttccagccctgatctggcttccagccctacgctggcttccagccc

SEQ ID NO: 7507 - DNA, 139 bp, synthetic construct
  source 1..139: mol_type = other DNA
gggctggaagcctgctttgggctggaagcctgatctgggctggaagcctacgctgggctggaagcctgccgctgggctggaagcctgctttgggctggaagcctgatctgggctggaagcctacgctgggctggaagcc

SEQ ID NO: 7508 - DNA, 139 bp, synthetic construct
  source 1..139: mol_type = other DNA
ggcttccagccttgctttggcttccagccttgatctggcttccagccttacgctggcttccagccttgccgctggcttccagccttgctttggcttccagccttgatctggcttccagccttacgctggcttccagcct

SEQ ID NO: 7509 - DNA, 139 bp, synthetic construct
  source 1..139: mol_type = other DNA
aggctggaagcctgctttaggctggaagcctgatctaggctggaagcctacgctaggctggaagcctgccgctaggctggaagcctgctttaggctggaagcctgatctaggctggaagcctacgctaggctggaagcc

SEQ ID NO: 7510 - DNA, 139 bp, synthetic construct
  source 1..139: mol_type = other DNA
ggcttctagccctgctttggcttctagccctgatctggcttctagccctacgctggcttctagccctgccgctggcttctagccctgctttggcttctagccctgatctggcttctagccctacgctggcttctagccc

SEQ ID NO: 7511 - DNA, 139 bp, synthetic construct
  source 1..139: mol_type = other DNA
gggctagaagcctgctttgggctagaagcctgatctgggctagaagcctacgctgggctagaagcctgccgctgggctagaagcctgctttgggctagaagcctgatctgggctagaagcctacgctgggctagaagcc

SEQ ID NO: 7512 - DNA, 139 bp, synthetic construct
  source 1..139: mol_type = other DNA
ggcttctagccttgctttggcttctagccttgatctggcttctagccttacgctggcttctagccttgccgctggcttctagccttgctttggcttctagccttgatctggcttctagccttacgctggcttctagcct

SEQ ID NO: 7513 - DNA, 139 bp, synthetic construct
  source 1..139: mol_type = other DNA
aggctagaagcctgctttaggctagaagcctgatctaggctagaagcctacgctaggctagaagcctgccgctaggctagaagcctgctttaggctagaagcctgatctaggctagaagcctacgctaggctagaagcc

SEQ ID NO: 7514 - DNA, 139 bp, synthetic construct
  source 1..139: mol_type = other DNA
gctgtacctccctgctttgctgtacctccctgatctgctgtacctccctacgctgctgtacctccctgccgctgctgtacctccctgctttgctgtacctccctgatctgctgtacctccctacgctgctgtacctccc

SEQ ID NO: 7515 - DNA, 139 bp, synthetic construct
  source 1..139: mol_type = other DNA
gggaggtacagctgctttgggaggtacagctgatctgggaggtacagctacgctgggaggtacagctgccgctgggaggtacagctgctttgggaggtacagctgatctgggaggtacagctacgctgggaggtacagc

SEQ ID NO: 7516 - DNA, 139 bp, synthetic construct
  source 1..139: mol_type = other DNA
gctgtacctccttgctttgctgtacctccttgatctgctgtacctccttacgctgctgtacctccttgccgctgctgtacctccttgctttgctgtacctccttgatctgctgtacctccttacgctgctgtacctcct

SEQ ID NO: 7517 - DNA, 139 bp, synthetic construct
  source 1..139: mol_type = other DNA
aggaggtacagctgctttaggaggtacagctgatctaggaggtacagctacgctaggaggtacagctgccgctaggaggtacagctgctttaggaggtacagctgatctaggaggtacagctacgctaggaggtacagc

SEQ ID NO: 7518 - DNA, 135 bp, synthetic construct
  source 1..135: mol_type = other DNA
tcagtttcactttctgatcttcagtttcactttctacgcttcagtttcactttctgccgcttcagtttcactttctgcttttcagtttcactttctgatcttcagtttcactttctacgcttcagtttcactttc

SEQ ID NO: 7519 - DNA, 135 bp, synthetic construct
  source 1..135: mol_type = other DNA
gaaagtgaaactgatgatctgaaagtgaaactgatacgctgaaagtgaaactgatgccgctgaaagtgaaactgatgctttgaaagtgaaactgatgatctgaaagtgaaactgatacgctgaaagtgaaactga

SEQ ID NO: 7520 - DNA, 135 bp, synthetic construct
  source 1..135: mol_type = other DNA
tcagtttcgctttctgatcttcagtttcgctttctacgcttcagtttcgctttctgccgcttcagtttcgctttctgcttttcagtttcgctttctgatcttcagtttcgctttctacgcttcagtttcgctttc

SEQ ID NO: 7521 - DNA, 135 bp, synthetic construct
  source 1..135: mol_type = other DNA
gaaagcgaaactgatgatctgaaagcgaaactgatacgctgaaagcgaaactgatgccgctgaaagcgaaactgatgctttgaaagcgaaactgatgatctgaaagcgaaactgatacgctgaaagcgaaactga

SEQ ID NO: 7522 - DNA, 142 bp, synthetic construct
  source 1..142: mol_type = other DNA
ctggctccatgccaatgatctctggctccatgccaatacgctctggctccatgccaatgccgctctggctccatgccaatgctttctggctccatgccaatgatctctggctccatgccaatacgctctggctccatgccaa

SEQ ID NO: 7523 - DNA, 142 bp, synthetic construct
  source 1..142: mol_type = other DNA
ttggcatggagccagtgatctttggcatggagccagtacgctttggcatggagccagtgccgctttggcatggagccagtgctttttggcatggagccagtgatctttggcatggagccagtacgctttggcatggagccag

SEQ ID NO: 7524 - DNA, 142 bp, synthetic construct
  source 1..142: mol_type = other DNA
ttggctccatgccaatgatctttggctccatgccaatacgctttggctccatgccaatgccgctttggctccatgccaatgctttttggctccatgccaatgatctttggctccatgccaatacgctttggctccatgccaa

SEQ ID NO: 7525 - DNA, 142 bp, synthetic construct
  source 1..142: mol_type = other DNA
ttggcatggagccaatgatctttggcatggagccaatacgctttggcatggagccaatgccgctttggcatggagccaatgctttttggcatggagccaatgatctttggcatggagccaatacgctttggcatggagccaa

SEQ ID NO: 7526 - DNA, 139 bp, synthetic construct
  source 1..139: mol_type = other DNA
ataaacatgatctataaacatacgctataaacatgccgctataaacatgctttataaacatgatctataaacatacgctataaacatgccgctataaacatgctttataaacatgatctataaacatacgctataaaca

SEQ ID NO: 7527 - DNA, 139 bp, synthetic construct
  source 1..139: mol_type = other DNA
tgtttattgatcttgtttattacgcttgtttattgccgcttgtttattgcttttgtttattgatcttgtttattacgcttgtttattgccgcttgtttattgcttttgtttattgatcttgtttattacgcttgtttat

SEQ ID NO: 7528 - DNA, 139 bp, synthetic construct
  source 1..139: mol_type = other DNA
gtaaacatgatctgtaaacatacgctgtaaacatgccgctgtaaacatgctttgtaaacatgatctgtaaacatacgctgtaaacatgccgctgtaaacatgctttgtaaacatgatctgtaaacatacgctgtaaaca

SEQ ID NO: 7529 - DNA, 139 bp, synthetic construct
  source 1..139: mol_type = other DNA
tgtttactgatcttgtttactacgcttgtttactgccgcttgtttactgcttttgtttactgatcttgtttactacgcttgtttactgccgcttgtttactgcttttgtttactgatcttgtttactacgcttgtttac

SEQ ID NO: 7530 - DNA, 139 bp, synthetic construct
  source 1..139: mol_type = other DNA
ggaaagcgaaagctaacctacgctggaaagcgaaagctaacctgccgctggaaagcgaaagctaacctgctttggaaagcgaaagctaacctgatctggaaagcgaaagctaacctacgctggaaagcgaaagctaacc

SEQ ID NO: 7531 - DNA, 139 bp, synthetic construct
  source 1..139: mol_type = other DNA
ggttagctttcgctttcctacgctggttagctttcgctttcctgccgctggttagctttcgctttcctgctttggttagctttcgctttcctgatctggttagctttcgctttcctacgctggttagctttcgctttcc

SEQ ID NO: 7532 - DNA, 139 bp, synthetic construct
  source 1..139: mol_type = other DNA
ggaaagcgaaagctatcctacgctggaaagcgaaagctatcctgccgctggaaagcgaaagctatcctgctttggaaagcgaaagctatcctgatctggaaagcgaaagctatcctacgctggaaagcgaaagctatcc

SEQ ID NO: 7533 - DNA, 139 bp, synthetic construct
  source 1..139: mol_type = other DNA
ggatagctttcgctttcctacgctggatagctttcgctttcctgccgctggatagctttcgctttcctgctttggatagctttcgctttcctgatctggatagctttcgctttcctacgctggatagctttcgctttcc

SEQ ID NO: 7534 - DNA, 139 bp, synthetic construct
  source 1..139: mol_type = other DNA
ggaaagcgaaagcttacctacgctggaaagcgaaagcttacctgccgctggaaagcgaaagcttacctgctttggaaagcgaaagcttacctgatctggaaagcgaaagcttacctacgctggaaagcgaaagcttacc

SEQ ID NO: 7535 - DNA, 139 bp, synthetic construct
  source 1..139: mol_type = other DNA
ggtaagctttcgctttcctacgctggtaagctttcgctttcctgccgctggtaagctttcgctttcctgctttggtaagctttcgctttcctgatctggtaagctttcgctttcctacgctggtaagctttcgctttcc

SEQ ID NO: 7536 - DNA, 139 bp, synthetic construct
  source 1..139: mol_type = other DNA
ggaaagcgaaagctttcctacgctggaaagcgaaagctttcctgccgctggaaagcgaaagctttcctgctttggaaagcgaaagctttcctgatctggaaagcgaaagctttcctacgctggaaagcgaaagctttcc

SEQ ID NO: 7537 - DNA, 139 bp, synthetic construct
  source 1..139: mol_type = other DNA
ggaaagctttcgctttcctacgctggaaagctttcgctttcctgccgctggaaagctttcgctttcctgctttggaaagctttcgctttcctgatctggaaagctttcgctttcctacgctggaaagctttcgctttcc

SEQ ID NO: 7538 - DNA, 139 bp, synthetic construct
  source 1..139: mol_type = other DNA
ggaaagcgaaacctaacctacgctggaaagcgaaacctaacctgccgctggaaagcgaaacctaacctgctttggaaagcgaaacctaacctgatctggaaagcgaaacctaacctacgctggaaagcgaaacctaacc

SEQ ID NO: 7539 - DNA, 139 bp, synthetic construct
  source 1..139: mol_type = other DNA
ggttaggtttcgctttcctacgctggttaggtttcgctttcctgccgctggttaggtttcgctttcctgctttggttaggtttcgctttcctgatctggttaggtttcgctttcctacgctggttaggtttcgctttcc

SEQ ID NO: 7540 - DNA, 139 bp, synthetic construct
  source 1..139: mol_type = other DNA
ggaaagcgaaacctatcctacgctggaaagcgaaacctatcctgccgctggaaagcgaaacctatcctgctttggaaagcgaaacctatcctgatctggaaagcgaaacctatcctacgctggaaagcgaaacctatcc

SEQ ID NO: 7541 - DNA, 139 bp, synthetic construct
  source 1..139: mol_type = other DNA
ggataggtttcgctttcctacgctggataggtttcgctttcctgccgctggataggtttcgctttcctgctttggataggtttcgctttcctgatctggataggtttcgctttcctacgctggataggtttcgctttcc

SEQ ID NO: 7542 - DNA, 139 bp, synthetic construct
  source 1..139: mol_type = other DNA
ggaaagcgaaaccttacctacgctggaaagcgaaaccttacctgccgctggaaagcgaaaccttacctgctttggaaagcgaaaccttacctgatctggaaagcgaaaccttacctacgctggaaagcgaaaccttacc

SEQ ID NO: 7543 - DNA, 139 bp, synthetic construct
  source 1..139: mol_type = other DNA
ggtaaggtttcgctttcctacgctggtaaggtttcgctttcctgccgctggtaaggtttcgctttcctgctttggtaaggtttcgctttcctgatctggtaaggtttcgctttcctacgctggtaaggtttcgctttcc

SEQ ID NO: 7544 - DNA, 139 bp, synthetic construct
  source 1..139: mol_type = other DNA
ggaaagcgaaacctttcctacgctggaaagcgaaacctttcctgccgctggaaagcgaaacctttcctgctttggaaagcgaaacctttcctgatctggaaagcgaaacctttcctacgctggaaagcgaaacctttcc

SEQ ID NO: 7545 - DNA, 139 bp, synthetic construct
  source 1..139: mol_type = other DNA
ggaaaggtttcgctttcctacgctggaaaggtttcgctttcctgccgctggaaaggtttcgctttcctgctttggaaaggtttcgctttcctgatctggaaaggtttcgctttcctacgctggaaaggtttcgctttcc

SEQ ID NO: 7546 - DNA, 139 bp, synthetic construct
  source 1..139: mol_type = other DNA
ggaaagtgaaagctaacctacgctggaaagtgaaagctaacctgccgctggaaagtgaaagctaacctgctttggaaagtgaaagctaacctgatctggaaagtgaaagctaacctacgctggaaagtgaaagctaacc

SEQ ID NO: 7547 - DNA, 139 bp, synthetic construct
  source 1..139: mol_type = other DNA
ggttagctttcactttcctacgctggttagctttcactttcctgccgctggttagctttcactttcctgctttggttagctttcactttcctgatctggttagctttcactttcctacgctggttagctttcactttcc

SEQ ID NO: 7548 - DNA, 139 bp, synthetic construct
  source 1..139: mol_type = other DNA
ggaaagtgaaagctatcctacgctggaaagtgaaagctatcctgccgctggaaagtgaaagctatcctgctttggaaagtgaaagctatcctgatctggaaagtgaaagctatcctacgctggaaagtgaaagctatcc

SEQ ID NO: 7549 - DNA, 139 bp, synthetic construct
  source 1..139: mol_type = other DNA
ggatagctttcactttcctacgctggatagctttcactttcctgccgctggatagctttcactttcctgctttggatagctttcactttcctgatctggatagctttcactttcctacgctggatagctttcactttcc

SEQ ID NO: 7550 - DNA, 139 bp, synthetic construct
  source 1..139: mol_type = other DNA
ggaaagtgaaagcttacctacgctggaaagtgaaagcttacctgccgctggaaagtgaaagcttacctgctttggaaagtgaaagcttacctgatctggaaagtgaaagcttacctacgctggaaagtgaaagcttacc

SEQ ID NO: 7551 - DNA, 139 bp, synthetic construct
  source 1..139: mol_type = other DNA
ggtaagctttcactttcctacgctggtaagctttcactttcctgccgctggtaagctttcactttcctgctttggtaagctttcactttcctgatctggtaagctttcactttcctacgctggtaagctttcactttcc

SEQ ID NO: 7552 - DNA, 139 bp, synthetic construct
  source 1..139: mol_type = other DNA
ggaaagtgaaagctttcctacgctggaaagtgaaagctttcctgccgctggaaagtgaaagctttcctgctttggaaagtgaaagctttcctgatctggaaagtgaaagctttcctacgctggaaagtgaaagctttcc

SEQ ID NO: 7553 - DNA, 139 bp, synthetic construct
  source 1..139: mol_type = other DNA
ggaaagctttcactttcctacgctggaaagctttcactttcctgccgctggaaagctttcactttcctgctttggaaagctttcactttcctgatctggaaagctttcactttcctacgctggaaagctttcactttcc

SEQ ID NO: 7554 - DNA, 139 bp, synthetic construct
  source 1..139: mol_type = other DNA
ggaaagtgaaacctaacctacgctggaaagtgaaacctaacctgccgctggaaagtgaaacctaacctgctttggaaagtgaaacctaacctgatctggaaagtgaaacctaacctacgctggaaagtgaaacctaacc

SEQ ID NO: 7555 - DNA, 139 bp, synthetic construct
  source 1..139: mol_type = other DNA
ggttaggtttcactttcctacgctggttaggtttcactttcctgccgctggttaggtttcactttcctgctttggttaggtttcactttcctgatctggttaggtttcactttcctacgctggttaggtttcactttcc

SEQ ID NO: 7556 - DNA, 139 bp, synthetic construct
  source 1..139: mol_type = other DNA
ggaaagtgaaacctatcctacgctggaaagtgaaacctatcctgccgctggaaagtgaaacctatcctgctttggaaagtgaaacctatcctgatctggaaagtgaaacctatcctacgctggaaagtgaaacctatcc

SEQ ID NO: 7557 - DNA, 139 bp, synthetic construct
  source 1..139: mol_type = other DNA
ggataggtttcactttcctacgctggataggtttcactttcctgccgctggataggtttcactttcctgctttggataggtttcactttcctgatctggataggtttcactttcctacgctggataggtttcactttcc

SEQ ID NO: 7558 - DNA, 139 bp, synthetic construct
  source 1..139: mol_type = other DNA
ggaaagtgaaaccttacctacgctggaaagtgaaaccttacctgccgctggaaagtgaaaccttacctgctttggaaagtgaaaccttacctgatctggaaagtgaaaccttacctacgctggaaagtgaaaccttacc

SEQ ID NO: 7559 - DNA, 139 bp, synthetic construct
  source 1..139: mol_type = other DNA
ggtaaggtttcactttcctacgctggtaaggtttcactttcctgccgctggtaaggtttcactttcctgctttggtaaggtttcactttcctgatctggtaaggtttcactttcctacgctggtaaggtttcactttcc

SEQ ID NO: 7560 - DNA, 139 bp, synthetic construct
  source 1..139: mol_type = other DNA
ggaaagtgaaacctttcctacgctggaaagtgaaacctttcctgccgctggaaagtgaaacctttcctgctttggaaagtgaaacctttcctgatctggaaagtgaaacctttcctacgctggaaagtgaaacctttcc

SEQ ID NO: 7561 - DNA, 139 bp, synthetic construct
  source 1..139: mol_type = other DNA
ggaaaggtttcactttcctacgctggaaaggtttcactttcctgccgctggaaaggtttcactttcctgctttggaaaggtttcactttcctgatctggaaaggtttcactttcctacgctggaaaggtttcactttcc

SEQ ID NO: 7562 - DNA, 139 bp, synthetic construct
  source 1..139: mol_type = other DNA
cgaaagcgaaagctaacctacgctcgaaagcgaaagctaacctgccgctcgaaagcgaaagctaacctgctttcgaaagcgaaagctaacctgatctcgaaagcgaaagctaacctacgctcgaaagcgaaagctaacc

SEQ ID NO: 7563 - DNA, 139 bp, synthetic construct
  source 1..139: mol_type = other DNA
ggttagctttcgctttcgtacgctggttagctttcgctttcgtgccgctggttagctttcgctttcgtgctttggttagctttcgctttcgtgatctggttagctttcgctttcgtacgctggttagctttcgctttcg

SEQ ID NO: 7564 - DNA, 139 bp, synthetic construct
  source 1..139: mol_type = other DNA
cgaaagcgaaagctatcctacgctcgaaagcgaaagctatcctgccgctcgaaagcgaaagctatcctgctttcgaaagcgaaagctatcctgatctcgaaagcgaaagctatcctacgctcgaaagcgaaagctatcc

SEQ ID NO: 7565 - DNA, 139 bp, synthetic construct
  source 1..139: mol_type = other DNA
ggatagctttcgctttcgtacgctggatagctttcgctttcgtgccgctggatagctttcgctttcgtgctttggatagctttcgctttcgtgatctggatagctttcgctttcgtacgctggatagctttcgctttcg

SEQ ID NO: 7566 - DNA, 139 bp, synthetic construct
  source 1..139: mol_type = other DNA
cgaaagcgaaagcttacctacgctcgaaagcgaaagcttacctgccgctcgaaagcgaaagcttacctgctttcgaaagcgaaagcttacctgatctcgaaagcgaaagcttacctacgctcgaaagcgaaagcttacc

SEQ ID NO: 7567 - DNA, 139 bp, synthetic construct
  source 1..139: mol_type = other DNA
ggtaagctttcgctttcgtacgctggtaagctttcgctttcgtgccgctggtaagctttcgctttcgtgctttggtaagctttcgctttcgtgatctggtaagctttcgctttcgtacgctggtaagctttcgctttcg

SEQ ID NO: 7568 - DNA, 139 bp, synthetic construct
  source 1..139: mol_type = other DNA
cgaaagcgaaagctttcctacgctcgaaagcgaaagctttcctgccgctcgaaagcgaaagctttcctgctttcgaaagcgaaagctttcctgatctcgaaagcgaaagctttcctacgctcgaaagcgaaagctttcc

SEQ ID NO: 7569 - DNA, 139 bp, synthetic construct
  source 1..139: mol_type = other DNA
ggaaagctttcgctttcgtacgctggaaagctttcgctttcgtgccgctggaaagctttcgctttcgtgctttggaaagctttcgctttcgtgatctggaaagctttcgctttcgtacgctggaaagctttcgctttcg

SEQ ID NO: 7570 - DNA, 139 bp, synthetic construct
  source 1..139: mol_type = other DNA
cgaaagcgaaacctaacctacgctcgaaagcgaaacctaacctgccgctcgaaagcgaaacctaacctgctttcgaaagcgaaacctaacctgatctcgaaagcgaaacctaacctacgctcgaaagcgaaacctaacc

SEQ ID NO: 7571 - DNA, 139 bp, synthetic construct
  source 1..139: mol_type = other DNA
ggttaggtttcgctttcgtacgctggttaggtttcgctttcgtgccgctggttaggtttcgctttcgtgctttggttaggtttcgctttcgtgatctggttaggtttcgctttcgtacgctggttaggtttcgctttcg

SEQ ID NO: 7572 - DNA, 139 bp, synthetic construct
  source 1..139: mol_type = other DNA
cgaaagcgaaacctatcctacgctcgaaagcgaaacctatcctgccgctcgaaagcgaaacctatcctgctttcgaaagcgaaacctatcctgatctcgaaagcgaaacctatcctacgctcgaaagcgaaacctatcc

SEQ ID NO: 7573 - DNA, 139 bp, synthetic construct
  source 1..139: mol_type = other DNA
ggataggtttcgctttcgtacgctggataggtttcgctttcgtgccgctggataggtttcgctttcgtgctttggataggtttcgctttcgtgatctggataggtttcgctttcgtacgctggataggtttcgctttcg

SEQ ID NO: 7574 - DNA, 139 bp, synthetic construct
  source 1..139: mol_type = other DNA
cgaaagcgaaaccttacctacgctcgaaagcgaaaccttacctgccgctcgaaagcgaaaccttacctgctttcgaaagcgaaaccttacctgatctcgaaagcgaaaccttacctacgctcgaaagcgaaaccttacc

SEQ ID NO: 7575 - DNA, 139 bp, synthetic construct
  source 1..139: mol_type = other DNA
ggtaaggtttcgctttcgtacgctggtaaggtttcgctttcgtgccgctggtaaggtttcgctttcgtgctttggtaaggtttcgctttcgtgatctggtaaggtttcgctttcgtacgctggtaaggtttcgctttcg

SEQ ID NO: 7576 - DNA, 139 bp, synthetic construct
  source 1..139: mol_type = other DNA
cgaaagcgaaacctttcctacgctcgaaagcgaaacctttcctgccgctcgaaagcgaaacctttcctgctttcgaaagcgaaacctttcctgatctcgaaagcgaaacctttcctacgctcgaaagcgaaacctttcc

SEQ ID NO: 7577 - DNA, 139 bp, synthetic construct
  source 1..139: mol_type = other DNA
ggaaaggtttcgctttcgtacgctggaaaggtttcgctttcgtgccgctggaaaggtttcgctttcgtgctttggaaaggtttcgctttcgtgatctggaaaggtttcgctttcgtacgctggaaaggtttcgctttcg

SEQ ID NO: 7578 - DNA, 139 bp, synthetic construct
  source 1..139: mol_type = other DNA
cgaaagtgaaagctaacctacgctcgaaagtgaaagctaacctgccgctcgaaagtgaaagctaacctgctttcgaaagtgaaagctaacctgatctcgaaagtgaaagctaacctacgctcgaaagtgaaagctaacc

SEQ ID NO: 7579 - DNA, 139 bp, synthetic construct
  source 1..139: mol_type = other DNA
ggttagctttcactttcgtacgctggttagctttcactttcgtgccgctggttagctttcactttcgtgctttggttagctttcactttcgtgatctggttagctttcactttcgtacgctggttagctttcactttcg

SEQ ID NO: 7580 - DNA, 139 bp, synthetic construct
  source 1..139: mol_type = other DNA
cgaaagtgaaagctatcctacgctcgaaagtgaaagctatcctgccgctcgaaagtgaaagctatcctgctttcgaaagtgaaagctatcctgatctcgaaagtgaaagctatcctacgctcgaaagtgaaagctatcc

SEQ ID NO: 7581 - DNA, 139 bp, synthetic construct
  source 1..139: mol_type = other DNA
ggatagctttcactttcgtacgctggatagctttcactttcgtgccgctggatagctttcactttcgtgctttggatagctttcactttcgtgatctggatagctttcactttcgtacgctggatagctttcactttcg

SEQ ID NO: 7582 - DNA, 139 bp, synthetic construct
  source 1..139: mol_type = other DNA
cgaaagtgaaagcttacctacgctcgaaagtgaaagcttacctgccgctcgaaagtgaaagcttacctgctttcgaaagtgaaagcttacctgatctcgaaagtgaaagcttacctacgctcgaaagtgaaagcttacc

SEQ ID NO: 7583 - DNA, 139 bp, synthetic construct
  source 1..139: mol_type = other DNA
ggtaagctttcactttcgtacgctggtaagctttcactttcgtgccgctggtaagctttcactttcgtgctttggtaagctttcactttcgtgatctggtaagctttcactttcgtacgctggtaagctttcactttcg

SEQ ID NO: 7584 - DNA, 139 bp, synthetic construct
  source 1..139: mol_type = other DNA
cgaaagtgaaagctttcctacgctcgaaagtgaaagctttcctgccgctcgaaagtgaaagctttcctgctttcgaaagtgaaagctttcctgatctcgaaagtgaaagctttcctacgctcgaaagtgaaagctttcc

SEQ ID NO: 7585 - DNA, 139 bp, synthetic construct
  source 1..139: mol_type = other DNA
ggaaagctttcactttcgtacgctggaaagctttcactttcgtgccgctggaaagctttcactttcgtgctttggaaagctttcactttcgtgatctggaaagctttcactttcgtacgctggaaagctttcactttcg

SEQ ID NO: 7586 - DNA, 139 bp, synthetic construct
  source 1..139: mol_type = other DNA
cgaaagtgaaacctaacctacgctcgaaagtgaaacctaacctgccgctcgaaagtgaaacctaacctgctttcgaaagtgaaacctaacctgatctcgaaagtgaaacctaacctacgctcgaaagtgaaacctaacc

SEQ ID NO: 7587 - DNA, 139 bp, synthetic construct
  source 1..139: mol_type = other DNA
ggttaggtttcactttcgtacgctggttaggtttcactttcgtgccgctggttaggtttcactttcgtgctttggttaggtttcactttcgtgatctggttaggtttcactttcgtacgctggttaggtttcactttcg

SEQ ID NO: 7588 - DNA, 139 bp, synthetic construct
  source 1..139: mol_type = other DNA
cgaaagtgaaacctatcctacgctcgaaagtgaaacctatcctgccgctcgaaagtgaaacctatcctgctttcgaaagtgaaacctatcctgatctcgaaagtgaaacctatcctacgctcgaaagtgaaacctatcc

SEQ ID NO: 7589 - DNA, 139 bp, synthetic construct
  source 1..139: mol_type = other DNA
ggataggtttcactttcgtacgctggataggtttcactttcgtgccgctggataggtttcactttcgtgctttggataggtttcactttcgtgatctggataggtttcactttcgtacgctggataggtttcactttcg

SEQ ID NO: 7590 - DNA, 139 bp, synthetic construct
  source 1..139: mol_type = other DNA
cgaaagtgaaaccttacctacgctcgaaagtgaaaccttacctgccgctcgaaagtgaaaccttacctgctttcgaaagtgaaaccttacctgatctcgaaagtgaaaccttacctacgctcgaaagtgaaaccttacc

SEQ ID NO: 7591 - DNA, 139 bp, synthetic construct
  source 1..139: mol_type = other DNA
ggtaaggtttcactttcgtacgctggtaaggtttcactttcgtgccgctggtaaggtttcactttcgtgctttggtaaggtttcactttcgtgatctggtaaggtttcactttcgtacgctggtaaggtttcactttcg

SEQ ID NO: 7592 - DNA, 139 bp, synthetic construct
  source 1..139: mol_type = other DNA
cgaaagtgaaacctttcctacgctcgaaagtgaaacctttcctgccgctcgaaagtgaaacctttcctgctttcgaaagtgaaacctttcctgatctcgaaagtgaaacctttcctacgctcgaaagtgaaacctttcc

SEQ ID NO: 7593 - DNA, 139 bp, synthetic construct
  source 1..139: mol_type = other DNA
ggaaaggtttcactttcgtacgctggaaaggtttcactttcgtgccgctggaaaggtttcactttcgtgctttggaaaggtttcactttcgtgatctggaaaggtttcactttcgtacgctggaaaggtttcactttcg

SEQ ID NO: 7594 - DNA, 135 bp, synthetic construct
  source 1..135: mol_type = other DNA
ctgcctccctcccttgatctctgcctccctcccttacgctctgcctccctcccttgccgctctgcctccctcccttgctttctgcctccctcccttgatctctgcctccctcccttacgctctgcctccctccct

SEQ ID NO: 7595 - DNA, 135 bp, synthetic construct
  source 1..135: mol_type = other DNA
agggagggaggcagtgatctagggagggaggcagtacgctagggagggaggcagtgccgctagggagggaggcagtgctttagggagggaggcagtgatctagggagggaggcagtacgctagggagggaggcag

SEQ ID NO: 7596 - DNA, 135 bp, synthetic construct
  source 1..135: mol_type = other DNA
ctgcttccctcccttgatctctgcttccctcccttacgctctgcttccctcccttgccgctctgcttccctcccttgctttctgcttccctcccttgatctctgcttccctcccttacgctctgcttccctccct

SEQ ID NO: 7597 - DNA, 135 bp, synthetic construct
  source 1..135: mol_type = other DNA
agggagggaagcagtgatctagggagggaagcagtacgctagggagggaagcagtgccgctagggagggaagcagtgctttagggagggaagcagtgatctagggagggaagcagtacgctagggagggaagcag

SEQ ID NO: 7598 - DNA, 135 bp, synthetic construct
  source 1..135: mol_type = other DNA
ctgtctccctcccttgatctctgtctccctcccttacgctctgtctccctcccttgccgctctgtctccctcccttgctttctgtctccctcccttgatctctgtctccctcccttacgctctgtctccctccct

SEQ ID NO: 7599 - DNA, 135 bp, synthetic construct
  source 1..135: mol_type = other DNA
agggagggagacagtgatctagggagggagacagtacgctagggagggagacagtgccgctagggagggagacagtgctttagggagggagacagtgatctagggagggagacagtacgctagggagggagacag

SEQ ID NO: 7600 - DNA, 135 bp, synthetic construct
  source 1..135: mol_type = other DNA
ctgtttccctcccttgatctctgtttccctcccttacgctctgtttccctcccttgccgctctgtttccctcccttgctttctgtttccctcccttgatctctgtttccctcccttacgctctgtttccctccct

SEQ ID NO: 7601 - DNA, 135 bp, synthetic construct
  source 1..135: mol_type = other DNA
agggagggaaacagtgatctagggagggaaacagtacgctagggagggaaacagtgccgctagggagggaaacagtgctttagggagggaaacagtgatctagggagggaaacagtacgctagggagggaaacag

SEQ ID NO: 7602 - DNA, 135 bp, synthetic construct
  source 1..135: mol_type = other DNA
ctccctccctcccttgatctctccctccctcccttacgctctccctccctcccttgccgctctccctccctcccttgctttctccctccctcccttgatctctccctccctcccttacgctctccctccctccct

SEQ ID NO: 7603 - DNA, 135 bp, synthetic construct
  source 1..135: mol_type = other DNA
agggagggagggagtgatctagggagggagggagtacgctagggagggagggagtgccgctagggagggagggagtgctttagggagggagggagtgatctagggagggagggagtacgctagggagggagggag

SEQ ID NO: 7604 - DNA, 135 bp, synthetic construct
  source 1..135: mol_type = other DNA
ctccttccctcccttgatctctccttccctcccttacgctctccttccctcccttgccgctctccttccctcccttgctttctccttccctcccttgatctctccttccctcccttacgctctccttccctccct

SEQ ID NO: 7605 - DNA, 135 bp, synthetic construct
  source 1..135: mol_type = other DNA
agggagggaaggagtgatctagggagggaaggagtacgctagggagggaaggagtgccgctagggagggaaggagtgctttagggagggaaggagtgatctagggagggaaggagtacgctagggagggaaggag

SEQ ID NO: 7606 - DNA, 135 bp, synthetic construct
  source 1..135: mol_type = other DNA
ctctctccctcccttgatctctctctccctcccttacgctctctctccctcccttgccgctctctctccctcccttgctttctctctccctcccttgatctctctctccctcccttacgctctctctccctccct

SEQ ID NO: 7607 - DNA, 135 bp, synthetic construct
  source 1..135: mol_type = other DNA
agggagggagagagtgatctagggagggagagagtacgctagggagggagagagtgccgctagggagggagagagtgctttagggagggagagagtgatctagggagggagagagtacgctagggagggagagag

SEQ ID NO: 7608 - DNA, 135 bp, synthetic construct
  source 1..135: mol_type = other DNA
ctctttccctcccttgatctctctttccctcccttacgctctctttccctcccttgccgctctctttccctcccttgctttctctttccctcccttgatctctctttccctcccttacgctctctttccctccct

SEQ ID NO: 7609 - DNA, 135 bp, synthetic construct
  source 1..135: mol_type = other DNA
agggagggaaagagtgatctagggagggaaagagtacgctagggagggaaagagtgccgctagggagggaaagagtgctttagggagggaaagagtgatctagggagggaaagagtacgctagggagggaaagag

SEQ ID NO: 7610 - DNA, 139 bp, synthetic construct
  source 1..139: mol_type = other DNA
aaatgacgtcattgctttaaatgacgtcattgatctaaatgacgtcattacgctaaatgacgtcattgccgctaaatgacgtcattgctttaaatgacgtcattgatctaaatgacgtcattacgctaaatgacgtcat

SEQ ID NO: 7611 - DNA, 139 bp, synthetic construct
  source 1..139: mol_type = other DNA
atgacgtcattttgctttatgacgtcattttgatctatgacgtcattttacgctatgacgtcattttgccgctatgacgtcattttgctttatgacgtcattttgatctatgacgtcattttacgctatgacgtcattt

SEQ ID NO: 7612 - DNA, 139 bp, synthetic construct
  source 1..139: mol_type = other DNA
acatgacgtcattgctttacatgacgtcattgatctacatgacgtcattacgctacatgacgtcattgccgctacatgacgtcattgctttacatgacgtcattgatctacatgacgtcattacgctacatgacgtcat

SEQ ID NO: 7613 - DNA, 139 bp, synthetic construct
  source 1..139: mol_type = other DNA
atgacgtcatgttgctttatgacgtcatgttgatctatgacgtcatgttacgctatgacgtcatgttgccgctatgacgtcatgttgctttatgacgtcatgttgatctatgacgtcatgttacgctatgacgtcatgt

SEQ ID NO: 7614 - DNA, 139 bp, synthetic construct
  source 1..139: mol_type = other DNA
agatgacgtcattgctttagatgacgtcattgatctagatgacgtcattacgctagatgacgtcattgccgctagatgacgtcattgctttagatgacgtcattgatctagatgacgtcattacgctagatgacgtcat

SEQ ID NO: 7615 - DNA, 139 bp, synthetic construct
  source 1..139: mol_type = other DNA
atgacgtcatcttgctttatgacgtcatcttgatctatgacgtcatcttacgctatgacgtcatcttgccgctatgacgtcatcttgctttatgacgtcatcttgatctatgacgtcatcttacgctatgacgtcatct

SEQ ID NO: 7616 - DNA, 139 bp, synthetic construct
  source 1..139: mol_type = other DNA
caatgacgtcattgctttcaatgacgtcattgatctcaatgacgtcattacgctcaatgacgtcattgccgctcaatgacgtcattgctttcaatgacgtcattgatctcaatgacgtcattacgctcaatgacgtcat

SEQ ID NO: 7617 - DNA, 139 bp, synthetic construct
  source 1..139: mol_type = other DNA
atgacgtcattgtgctttatgacgtcattgtgatctatgacgtcattgtacgctatgacgtcattgtgccgctatgacgtcattgtgctttatgacgtcattgtgatctatgacgtcattgtacgctatgacgtcattg

SEQ ID NO: 7618 - DNA, 139 bp, synthetic construct
  source 1..139: mol_type = other DNA
ccatgacgtcattgctttccatgacgtcattgatctccatgacgtcattacgctccatgacgtcattgccgctccatgacgtcattgctttccatgacgtcattgatctccatgacgtcattacgctccatgacgtcat

SEQ ID NO: 7619 - DNA, 139 bp, synthetic construct
  source 1..139: mol_type = other DNA
atgacgtcatggtgctttatgacgtcatggtgatctatgacgtcatggtacgctatgacgtcatggtgccgctatgacgtcatggtgctttatgacgtcatggtgatctatgacgtcatggtacgctatgacgtcatgg

SEQ ID NO: 7620 - DNA, 139 bp, synthetic construct
  source 1..139: mol_type = other DNA
cgatgacgtcattgctttcgatgacgtcattgatctcgatgacgtcattacgctcgatgacgtcattgccgctcgatgacgtcattgctttcgatgacgtcattgatctcgatgacgtcattacgctcgatgacgtcat

SEQ ID NO: 7621 - DNA, 139 bp, synthetic construct
  source 1..139: mol_type = other DNA
atgacgtcatcgtgctttatgacgtcatcgtgatctatgacgtcatcgtacgctatgacgtcatcgtgccgctatgacgtcatcgtgctttatgacgtcatcgtgatctatgacgtcatcgtacgctatgacgtcatcg

SEQ ID NO: 7622 - DNA, 139 bp, synthetic construct
  source 1..139: mol_type = other DNA
gaatgacgtcattgctttgaatgacgtcattgatctgaatgacgtcattacgctgaatgacgtcattgccgctgaatgacgtcattgctttgaatgacgtcattgatctgaatgacgtcattacgctgaatgacgtcat

SEQ ID NO: 7623 - DNA, 139 bp, synthetic construct
  source 1..139: mol_type = other DNA
atgacgtcattctgctttatgacgtcattctgatctatgacgtcattctacgctatgacgtcattctgccgctatgacgtcattctgctttatgacgtcattctgatctatgacgtcattctacgctatgacgtcattc

SEQ ID NO: 7624 - DNA, 139 bp, synthetic construct
  source 1..139: mol_type = other DNA
gcatgacgtcattgctttgcatgacgtcattgatctgcatgacgtcattacgctgcatgacgtcattgccgctgcatgacgtcattgctttgcatgacgtcattgatctgcatgacgtcattacgctgcatgacgtcat

SEQ ID NO: 7625 - DNA, 139 bp, synthetic construct
  source 1..139: mol_type = other DNA
atgacgtcatgctgctttatgacgtcatgctgatctatgacgtcatgctacgctatgacgtcatgctgccgctatgacgtcatgctgctttatgacgtcatgctgatctatgacgtcatgctacgctatgacgtcatgc

SEQ ID NO: 7626 - DNA, 139 bp, synthetic construct; identical to SEQ ID NO: 6469
  source 1..139: mol_type = other DNA

SEQ ID NO: 7627 - DNA, 139 bp, synthetic construct; identical to SEQ ID NO: 6468
  source 1..139: mol_type = other DNA

SEQ ID NO: 7628 - DNA, 133 bp, synthetic construct
  source 1..133: mol_type = other DNA
taattgttatttaatagtacgcttaattgttatttaatagtgccgcttaattgttatttaatagtgcttttaattgttatttaatagtgatcttaattgttatttaatagtacgcttaattgttatttaatag

SEQ ID NO: 7629 - DNA, 133 bp, synthetic construct
  source 1..133: mol_type = other DNA
ctattaaataacaattatacgctctattaaataacaattatgccgctctattaaataacaattatgctttctattaaataacaattatgatctctattaaataacaattatacgctctattaaataacaatta

SEQ ID NO: 7630 - DNA, 133 bp, synthetic construct
  source 1..133: mol_type = other DNA
taattgttttttaatagtacgcttaattgttttttaatagtgccgcttaattgttttttaatagtgcttttaattgttttttaatagtgatcttaattgttttttaatagtacgcttaattgttttttaatag

SEQ ID NO: 7631 - DNA, 133 bp, synthetic construct
  source 1..133: mol_type = other DNA
ctattaaaaaacaattatacgctctattaaaaaacaattatgccgctctattaaaaaacaattatgctttctattaaaaaacaattatgatctctattaaaaaacaattatacgctctattaaaaaacaatta

SEQ ID NO: 7632 - DNA, 142 bp, synthetic construct
  source 1..142: mol_type = other DNA
aaggcagcagcatcttgatctaaggcagcagcatcttacgctaaggcagcagcatcttgccgctaaggcagcagcatcttgctttaaggcagcagcatcttgatctaaggcagcagcatcttacgctaaggcagcagcatct

SEQ ID NO: 7633 - DNA, 142 bp, synthetic construct
  source 1..142: mol_type = other DNA
agatgctgctgcctttgatctagatgctgctgcctttacgctagatgctgctgcctttgccgctagatgctgctgcctttgctttagatgctgctgcctttgatctagatgctgctgcctttacgctagatgctgctgcctt

SEQ ID NO: 7634 - DNA, 142 bp, synthetic construct
  source 1..142: mol_type = other DNA
aaggcagtagcatcttgatctaaggcagtagcatcttacgctaaggcagtagcatcttgccgctaaggcagtagcatcttgctttaaggcagtagcatcttgatctaaggcagtagcatcttacgctaaggcagtagcatct

SEQ ID NO: 7635 - DNA, 142 bp, synthetic construct
  source 1..142: mol_type = other DNA
agatgctactgcctttgatctagatgctactgcctttacgctagatgctactgcctttgccgctagatgctactgcctttgctttagatgctactgcctttgatctagatgctactgcctttacgctagatgctactgcctt

SEQ ID NO: 7636 - DNA, 142 bp, synthetic construct
  source 1..142: mol_type = other DNA
aaggtagcagcatcttgatctaaggtagcagcatcttacgctaaggtagcagcatcttgccgctaaggtagcagcatcttgctttaaggtagcagcatcttgatctaaggtagcagcatcttacgctaaggtagcagcatct

SEQ ID NO: 7637 - DNA, 142 bp, synthetic construct
  source 1..142: mol_type = other DNA
agatgctgctacctttgatctagatgctgctacctttacgctagatgctgctacctttgccgctagatgctgctacctttgctttagatgctgctacctttgatctagatgctgctacctttacgctagatgctgctacctt

SEQ ID NO: 7638 - DNA, 142 bp, synthetic construct
  source 1..142: mol_type = other DNA
aaggtagtagcatcttgatctaaggtagtagcatcttacgctaaggtagtagcatcttgccgctaaggtagtagcatcttgctttaaggtagtagcatcttgatctaaggtagtagcatcttacgctaaggtagtagcatct

SEQ ID NO: 7639 - DNA, 142 bp, synthetic construct
  source 1..142: mol_type = other DNA
agatgctactacctttgatctagatgctactacctttacgctagatgctactacctttgccgctagatgctactacctttgctttagatgctactacctttgatctagatgctactacctttacgctagatgctactacctt

SEQ ID NO: 7640 - DNA, 142 bp, synthetic construct
  source 1..142: mol_type = other DNA
agggcagcagcatcttgatctagggcagcagcatcttacgctagggcagcagcatcttgccgctagggcagcagcatcttgctttagggcagcagcatcttgatctagggcagcagcatcttacgctagggcagcagcatct

SEQ ID NO: 7641 - DNA, 142 bp, synthetic construct
  source 1..142: mol_type = other DNA
agatgctgctgcccttgatctagatgctgctgcccttacgctagatgctgctgcccttgccgctagatgctgctgcccttgctttagatgctgctgcccttgatctagatgctgctgcccttacgctagatgctgctgccct

SEQ ID NO: 7642 - DNA, 142 bp, synthetic construct
  source 1..142: mol_type = other DNA
agggcagtagcatcttgatctagggcagtagcatcttacgctagggcagtagcatcttgccgctagggcagtagcatcttgctttagggcagtagcatcttgatctagggcagtagcatcttacgctagggcagtagcatct

SEQ ID NO: 7643 - DNA, 142 bp, synthetic construct
  source 1..142: mol_type = other DNA
agatgctactgcccttgatctagatgctactgcccttacgctagatgctactgcccttgccgctagatgctactgcccttgctttagatgctactgcccttgatctagatgctactgcccttacgctagatgctactgccct

SEQ ID NO: 7644 - DNA, 142 bp, synthetic construct
  source 1..142: mol_type = other DNA
agggtagcagcatcttgatctagggtagcagcatcttacgctagggtagcagcatcttgccgctagggtagcagcatcttgctttagggtagcagcatcttgatctagggtagcagcatcttacgctagggtagcagcatct

SEQ ID NO: 7645 - DNA, 142 bp, synthetic construct
  source 1..142: mol_type = other DNA
agatgctgctacccttgatctagatgctgctacccttacgctagatgctgctacccttgccgctagatgctgctacccttgctttagatgctgctacccttgatctagatgctgctacccttacgctagatgctgctaccct

SEQ ID NO: 7646 - DNA, 142 bp, synthetic construct
  source 1..142: mol_type = other DNA
agggtagtagcatcttgatctagggtagtagcatcttacgctagggtagtagcatcttgccgctagggtagtagcatcttgctttagggtagtagcatcttgatctagggtagtagcatcttacgctagggtagtagcatct

SEQ ID NO: 7647 - DNA, 142 bp, synthetic construct
  source 1..142: mol_type = other DNA
agatgctactacccttgatctagatgctactacccttacgctagatgctactacccttgccgctagatgctactacccttgctttagatgctactacccttgatctagatgctactacccttacgctagatgctactaccct

SEQ ID NO: 7648 - DNA, 142 bp, synthetic construct
  source 1..142: mol_type = other DNA
atggcagcagcatcttgatctatggcagcagcatcttacgctatggcagcagcatcttgccgctatggcagcagcatcttgctttatggcagcagcatcttgatctatggcagcagcatcttacgctatggcagcagcatct

SEQ ID NO: 7649 - DNA, 142 bp, synthetic construct
  source 1..142: mol_type = other DNA
agatgctgctgccattgatctagatgctgctgccattacgctagatgctgctgccattgccgctagatgctgctgccattgctttagatgctgctgccattgatctagatgctgctgccattacgctagatgctgctgccat

SEQ ID NO: 7650 - DNA, 142 bp, synthetic construct
  source 1..142: mol_type = other DNA
atggcagtagcatcttgatctatggcagtagcatcttacgctatggcagtagcatcttgccgctatggcagtagcatcttgctttatggcagtagcatcttgatctatggcagtagcatcttacgctatggcagtagcatct

SEQ ID NO: 7651 - DNA, 142 bp, synthetic construct
  source 1..142: mol_type = other DNA
agatgctactgccattgatctagatgctactgccattacgctagatgctactgccattgccgctagatgctactgccattgctttagatgctactgccattgatctagatgctactgccattacgctagatgctactgccat

SEQ ID NO: 7652 - DNA, 142 bp, synthetic construct
  source 1..142: mol_type = other DNA
atggtagcagcatcttgatctatggtagcagcatcttacgctatggtagcagcatcttgccgctatggtagcagcatcttgctttatggtagcagcatcttgatctatggtagcagcatcttacgctatggtagcagcatct

SEQ ID NO: 7653 - DNA, 142 bp, synthetic construct
  source 1..142: mol_type = other DNA
agatgctgctaccattgatctagatgctgctaccattacgctagatgctgctaccattgccgctagatgctgctaccattgctttagatgctgctaccattgatctagatgctgctaccattacgctagatgctgctaccat

SEQ ID NO: 7654 - DNA, 142 bp, synthetic construct
  source 1..142: mol_type = other DNA
atggtagtagcatcttgatctatggtagtagcatcttacgctatggtagtagcatcttgccgctatggtagtagcatcttgctttatggtagtagcatcttgatctatggtagtagcatcttacgctatggtagtagcatct

SEQ ID NO: 7655 - DNA, 142 bp, synthetic construct
  source 1..142: mol_type = other DNA
agatgctactaccattgatctagatgctactaccattacgctagatgctactaccattgccgctagatgctactaccattgctttagatgctactaccattgatctagatgctactaccattacgctagatgctactaccat

SEQ ID NO: 7656 - DNA, 139 bp, synthetic construct
  source 1..139: mol_type = other DNA
cttatctgccagtcgcagtacgctcttatctgccagtcgcagtgccgctcttatctgccagtcgcagtgctttcttatctgccagtcgcagtgatctcttatctgccagtcgcagtacgctcttatctgccagtcgcag

SEQ ID NO: 7657 - DNA, 139 bp, synthetic construct
  source 1..139: mol_type = other DNA
ctgcgactggcagataagtacgctctgcgactggcagataagtgccgctctgcgactggcagataagtgctttctgcgactggcagataagtgatctctgcgactggcagataagtacgctctgcgactggcagataag

SEQ ID NO: 7658 - DNA, 139 bp, synthetic construct
  source 1..139: mol_type = other DNA
cttatctgccagtcccagtacgctcttatctgccagtcccagtgccgctcttatctgccagtcccagtgctttcttatctgccagtcccagtgatctcttatctgccagtcccagtacgctcttatctgccagtcccag

SEQ ID NO: 7659 - DNA, 139 bp, synthetic construct
  source 1..139: mol_type = other DNA
ctgggactggcagataagtacgctctgggactggcagataagtgccgctctgggactggcagataagtgctttctgggactggcagataagtgatctctgggactggcagataagtacgctctgggactggcagataag

SEQ ID NO: 7660 - DNA, 139 bp, synthetic construct
  source 1..139: mol_type = other DNA
cttatctcccagtcgcagtacgctcttatctcccagtcgcagtgccgctcttatctcccagtcgcagtgctttcttatctcccagtcgcagtgatctcttatctcccagtcgcagtacgctcttatctcccagtcgcag

SEQ ID NO: 7661 - DNA, 139 bp, synthetic construct
  source 1..139: mol_type = other DNA
ctgcgactgggagataagtacgctctgcgactgggagataagtgccgctctgcgactgggagataagtgctttctgcgactgggagataagtgatctctgcgactgggagataagtacgctctgcgactgggagataag

SEQ ID NO: 7662 - DNA, 139 bp, synthetic construct
  source 1..139: mol_type = other DNA
cttatctcccagtcccagtacgctcttatctcccagtcccagtgccgctcttatctcccagtcccagtgctttcttatctcccagtcccagtgatctcttatctcccagtcccagtacgctcttatctcccagtcccag

SEQ ID NO: 7663 - DNA, 139 bp, synthetic construct
  source 1..139: mol_type = other DNA
ctgggactgggagataagtacgctctgggactgggagataagtgccgctctgggactgggagataagtgctttctgggactgggagataagtgatctctgggactgggagataagtacgctctgggactgggagataag

SEQ ID NO: 7664 - DNA, 139 bp, synthetic construct
  source 1..139: mol_type = other DNA
aaagagaaagtgaaagtatacgctaaagagaaagtgaaagtatgccgctaaagagaaagtgaaagtatgctttaaagagaaagtgaaagtatgatctaaagagaaagtgaaagtatacgctaaagagaaagtgaaagta

SEQ ID NO: 7665 - DNA, 139 bp, synthetic construct
  source 1..139: mol_type = other DNA
tactttcactttctcttttacgcttactttcactttctcttttgccgcttactttcactttctcttttgcttttactttcactttctcttttgatcttactttcactttctcttttacgcttactttcactttctcttt

SEQ ID NO: 7666 - DNA, 139 bp, synthetic construct
  source 1..139: mol_type = other DNA
aaagagaaagtgaaagtgtacgctaaagagaaagtgaaagtgtgccgctaaagagaaagtgaaagtgtgctttaaagagaaagtgaaagtgtgatctaaagagaaagtgaaagtgtacgctaaagagaaagtgaaagtg

SEQ ID NO: 7667 - DNA, 139 bp, synthetic construct
  source 1..139: mol_type = other DNA
cactttcactttctcttttacgctcactttcactttctcttttgccgctcactttcactttctcttttgctttcactttcactttctcttttgatctcactttcactttctcttttacgctcactttcactttctcttt

SEQ ID NO: 7668 - DNA, 139 bp, synthetic construct
  source 1..139: mol_type = other DNA
aaagagaaagtgaaactatacgctaaagagaaagtgaaactatgccgctaaagagaaagtgaaactatgctttaaagagaaagtgaaactatgatctaaagagaaagtgaaactatacgctaaagagaaagtgaaacta

SEQ ID NO: 7669 - DNA, 139 bp, synthetic construct
  source 1..139: mol_type = other DNA
tagtttcactttctcttttacgcttagtttcactttctcttttgccgcttagtttcactttctcttttgcttttagtttcactttctcttttgatcttagtttcactttctcttttacgcttagtttcactttctcttt

SEQ ID NO: 7670 - DNA, 139 bp, synthetic construct
  source 1..139: mol_type = other DNA
aaagagaaagtgaaactgtacgctaaagagaaagtgaaactgtgccgctaaagagaaagtgaaactgtgctttaaagagaaagtgaaactgtgatctaaagagaaagtgaaactgtacgctaaagagaaagtgaaactg

SEQ ID NO: 7671 - DNA, 139 bp, synthetic construct
  source 1..139: mol_type = other DNA
cagtttcactttctcttttacgctcagtttcactttctcttttgccgctcagtttcactttctcttttgctttcagtttcactttctcttttgatctcagtttcactttctcttttacgctcagtttcactttctcttt

SEQ ID NO: 7672 - DNA, 140 bp, synthetic construct
  source 1..140: mol_type = other DNA
ggtcacgtgatgccgctggtcacgtgatgctttggtcacgtgatgatctggtcacgtgatacgctggtcacgtgatgccgctggtcacgtgatgctttggtcacgtgatgatctggtcacgtgatacgctggtcacgtga

SEQ ID NO: 7673 - DNA, 140 bp, synthetic construct
  source 1..140: mol_type = other DNA
tcacgtgacctgccgcttcacgtgacctgcttttcacgtgacctgatcttcacgtgacctacgcttcacgtgacctgccgcttcacgtgacctgcttttcacgtgacctgatcttcacgtgacctacgcttcacgtgacc

SEQ ID NO: 7674 - DNA, 147 bp, synthetic construct
  source 1..147: mol_type = other DNA
aggtcagtgaccttgctttaggtcagtgaccttgatctaggtcagtgaccttacgctaggtcagtgaccttgccgctaggtcagtgaccttgctttaggtcagtgaccttgatctaggtcagtgaccttacgctaggtcagtgacct

SEQ ID NO: 7675 - DNA, 147 bp, synthetic construct
  source 1..147: mol_type = other DNA
aggtcactgaccttgctttaggtcactgaccttgatctaggtcactgaccttacgctaggtcactgaccttgccgctaggtcactgaccttgctttaggtcactgaccttgatctaggtcactgaccttacgctaggtcactgacct

SEQ ID NO: 7676 - DNA, 140 bp, synthetic construct
  source 1..140: mol_type = other DNA
tttccggtaatgccgcttttccggtaatgcttttttccggtaatgatcttttccggtaatacgcttttccggtaatgccgcttttccggtaatgcttttttccggtaatgatcttttccggtaatacgcttttccggtaa

SEQ ID NO: 7677 - DNA, 140 bp, synthetic construct
  source 1..140: mol_type = other DNA
ttaccggaaatgccgctttaccggaaatgctttttaccggaaatgatctttaccggaaatacgctttaccggaaatgccgctttaccggaaatgctttttaccggaaatgatctttaccggaaatacgctttaccggaaa

SEQ ID NO: 7678 - DNA, 125 bp, synthetic construct
  source 1..125: mol_type = other DNA
cccccgccccagtcgagccctgccgctcccccgccccagtcgagccctgctttcccccgccccagtcgagccctgatctcccccgccccagtcgagccctacgctcccccgccccagtcgagccc

SEQ ID NO: 7679 - DNA, 125 bp, synthetic construct
  source 1..125: mol_type = other DNA
gggctcgactggggcgggggtgccgctgggctcgactggggcgggggtgctttgggctcgactggggcgggggtgatctgggctcgactggggcgggggtacgctgggctcgactggggcggggg

SEQ ID NO: 7680 - DNA, 125 bp, synthetic construct
  source 1..125: mol_type = other DNA
cccccgccccagtcgagccttgccgctcccccgccccagtcgagccttgctttcccccgccccagtcgagccttgatctcccccgccccagtcgagccttacgctcccccgccccagtcgagcct

SEQ ID NO: 7681 - DNA, 125 bp, synthetic construct
  source 1..125: mol_type = other DNA
aggctcgactggggcgggggtgccgctaggctcgactggggcgggggtgctttaggctcgactggggcgggggtgatctaggctcgactggggcgggggtacgctaggctcgactggggcggggg

SEQ ID NO: 7682 - DNA, 125 bp, synthetic construct
  source 1..125: mol_type = other DNA
cccccgccccagtcgggccctgccgctcccccgccccagtcgggccctgctttcccccgccccagtcgggccctgatctcccccgccccagtcgggccctacgctcccccgccccagtcgggccc

SEQ ID NO: 7683 - DNA, 125 bp, synthetic construct
  source 1..125: mol_type = other DNA
gggcccgactggggcgggggtgccgctgggcccgactggggcgggggtgctttgggcccgactggggcgggggtgatctgggcccgactggggcgggggtacgctgggcccgactggggcggggg

SEQ ID NO: 7684 - DNA, 125 bp, synthetic construct
  source 1..125: mol_type = other DNA
cccccgccccagtcgggccttgccgctcccccgccccagtcgggccttgctttcccccgccccagtcgggccttgatctcccccgccccagtcgggccttacgctcccccgccccagtcgggcct

SEQ ID NO: 7685 - DNA, 125 bp, synthetic construct
  source 1..125: mol_type = other DNA
aggcccgactggggcgggggtgccgctaggcccgactggggcgggggtgctttaggcccgactggggcgggggtgatctaggcccgactggggcgggggtacgctaggcccgactggggcggggg

SEQ ID NO: 7686 - DNA, 125 bp, synthetic construct
  source 1..125: mol_type = other DNA
cccccgccccagtccagccctgccgctcccccgccccagtccagccctgctttcccccgccccagtccagccctgatctcccccgccccagtccagccctacgctcccccgccccagtccagccc

SEQ ID NO: 7687 - DNA, 125 bp, synthetic construct
  source 1..125: mol_type = other DNA
gggctggactggggcgggggtgccgctgggctggactggggcgggggtgctttgggctggactggggcgggggtgatctgggctggactggggcgggggtacgctgggctggactggggcggggg

SEQ ID NO: 7688 - DNA, 125 bp, synthetic construct
  source 1..125: mol_type = other DNA
cccccgccccagtccagccttgccgctcccccgccccagtccagccttgctttcccccgccccagtccagccttgatctcccccgccccagtccagccttacgctcccccgccccagtccagcct

SEQ ID NO: 7689 - DNA, 125 bp, synthetic construct
  source 1..125: mol_type = other DNA
aggctggactggggcgggggtgccgctaggctggactggggcgggggtgctttaggctggactggggcgggggtgatctaggctggactggggcgggggtacgctaggctggactggggcggggg

SEQ ID NO: 7690 - DNA, 125 bp, synthetic construct
  source 1..125: mol_type = other DNA
cccccgccccagtccggccctgccgctcccccgccccagtccggccctgctttcccccgccccagtccggccctgatctcccccgccccagtccggccctacgctcccccgccccagtccggccc

SEQ ID NO: 7691 - DNA, 125 bp, synthetic construct
  source 1..125: mol_type = other DNA
gggccggactggggcgggggtgccgctgggccggactggggcgggggtgctttgggccggactggggcgggggtgatctgggccggactggggcgggggtacgctgggccggactggggcggggg

SEQ ID NO: 7692 - DNA, 125 bp, synthetic construct
  source 1..125: mol_type = other DNA
cccccgccccagtccggccttgccgctcccccgccccagtccggccttgctttcccccgccccagtccggccttgatctcccccgccccagtccggccttacgctcccccgccccagtccggcct

SEQ ID NO: 7693 - DNA, 125 bp, synthetic construct
  source 1..125: mol_type = other DNA
aggccggactggggcgggggtgccgctaggccggactggggcgggggtgctttaggccggactggggcgggggtgatctaggccggactggggcgggggtacgctaggccggactggggcggggg

SEQ ID NO: 7694 - DNA, 125 bp, synthetic construct
  source 1..125: mol_type = other DNA
cccccgccccactcgagccctgccgctcccccgccccactcgagccctgctttcccccgccccactcgagccctgatctcccccgccccactcgagccctacgctcccccgccccactcgagccc

SEQ ID NO: 7695 - DNA, 125 bp, synthetic construct
  source 1..125: mol_type = other DNA
gggctcgagtggggcgggggtgccgctgggctcgagtggggcgggggtgctttgggctcgagtggggcgggggtgatctgggctcgagtggggcgggggtacgctgggctcgagtggggcggggg

SEQ ID NO: 7696 - DNA, 125 bp, synthetic construct
  source 1..125: mol_type = other DNA
cccccgccccactcgagccttgccgctcccccgccccactcgagccttgctttcccccgccccactcgagccttgatctcccccgccccactcgagccttacgctcccccgccccactcgagcct

SEQ ID NO: 7697 - DNA, 125 bp, synthetic construct
  source 1..125: mol_type = other DNA
aggctcgagtggggcgggggtgccgctaggctcgagtggggcgggggtgctttaggctcgagtggggcgggggtgatctaggctcgagtggggcgggggtacgctaggctcgagtggggcggggg

SEQ ID NO: 7698 - DNA, 125 bp, synthetic construct
  source 1..125: mol_type = other DNA
cccccgccccactcgggccctgccgctcccccgccccactcgggccctgctttcccccgccccactcgggccctgatctcccccgccccactcgggccctacgctcccccgccccactcgggccc

SEQ ID NO: 7699 - DNA, 125 bp, synthetic construct
  source 1..125: mol_type = other DNA
gggcccgagtggggcgggggtgccgctgggcccgagtggggcgggggtgctttgggcccgagtggggcgggggtgatctgggcccgagtggggcgggggtacgctgggcccgagtggggcggggg

SEQ ID NO: 7700 - DNA, 125 bp, synthetic construct
  source 1..125: mol_type = other DNA
cccccgccccactcgggccttgccgctcccccgccccactcgggccttgctttcccccgccccactcgggccttgatctcccccgccccactcgggccttacgctcccccgccccactcgggcct

SEQ ID NO: 7701 - DNA, 125 bp, synthetic construct
  source 1..125: mol_type = other DNA
aggcccgagtggggcgggggtgccgctaggcccgagtggggcgggggtgctttaggcccgagtggggcgggggtgatctaggcccgagtggggcgggggtacgctaggcccgagtggggcggggg

SEQ ID NO: 7702 - DNA, 125 bp, synthetic construct
  source 1..125: mol_type = other DNA
cccccgccccactccagccctgccgctcccccgccccactccagccctgctttcccccgccccactccagccctgatctcccccgccccactccagccctacgctcccccgccccactccagccc

SEQ ID NO: 7703 - DNA, 125 bp, synthetic construct
  source 1..125: mol_type = other DNA
gggctggagtggggcgggggtgccgctgggctggagtggggcgggggtgctttgggctggagtggggcgggggtgatctgggctggagtggggcgggggtacgctgggctggagtggggcggggg

SEQ ID NO: 7704 - DNA, 125 bp, synthetic construct
  source 1..125: mol_type = other DNA
cccccgccccactccagccttgccgctcccccgccccactccagccttgctttcccccgccccactccagccttgatctcccccgccccactccagccttacgctcccccgccccactccagcct

SEQ ID NO: 7705 - DNA, 125 bp, synthetic construct
  source 1..125: mol_type = other DNA
aggctggagtggggcgggggtgccgctaggctggagtggggcgggggtgctttaggctggagtggggcgggggtgatctaggctggagtggggcgggggtacgctaggctggagtggggcggggg

SEQ ID NO: 7706 - DNA, 125 bp, synthetic construct
  source 1..125: mol_type = other DNA
cccccgccccactccggccctgccgctcccccgccccactccggccctgctttcccccgccccactccggccctgatctcccccgccccactccggccctacgctcccccgccccactccggccc

SEQ ID NO: 7707 - DNA, 125 bp, synthetic construct
  source 1..125: mol_type = other DNA
gggccggagtggggcgggggtgccgctgggccggagtggggcgggggtgctttgggccggagtggggcgggggtgatctgggccggagtggggcgggggtacgctgggccggagtggggcggggg

SEQ ID NO: 7708 - DNA, 125 bp, synthetic construct
  source 1..125: mol_type = other DNA
cccccgccccactccggccttgccgctcccccgccccactccggccttgctttcccccgccccactccggccttgatctcccccgccccactccggccttacgctcccccgccccactccggcct

SEQ ID NO: 7709 - DNA, 125 bp, synthetic construct
  source 1..125: mol_type = other DNA
aggccggagtggggcgggggtgccgctaggccggagtggggcgggggtgctttaggccggagtggggcgggggtgatctaggccggagtggggcgggggtacgctaggccggagtggggcggggg

SEQ ID NO: 7710 - DNA, 125 bp, synthetic construct
  source 1..125: mol_type = other DNA
cccccgccccggtcgagccctgccgctcccccgccccggtcgagccctgctttcccccgccccggtcgagccctgatctcccccgccccggtcgagccctacgctcccccgccccggtcgagccc

SEQ ID NO: 7711 - DNA, 125 bp, synthetic construct
  source 1..125: mol_type = other DNA
gggctcgaccggggcgggggtgccgctgggctcgaccggggcgggggtgctttgggctcgaccggggcgggggtgatctgggctcgaccggggcgggggtacgctgggctcgaccggggcggggg

SEQ ID NO: 7712 - DNA, 125 bp, synthetic construct
  source 1..125: mol_type = other DNA
cccccgccccggtcgagccttgccgctcccccgccccggtcgagccttgctttcccccgccccggtcgagccttgatctcccccgccccggtcgagccttacgctcccccgccccggtcgagcct

SEQ ID NO: 7713 - DNA, 125 bp, synthetic construct
  source 1..125: mol_type = other DNA
aggctcgaccggggcgggggtgccgctaggctcgaccggggcgggggtgctttaggctcgaccggggcgggggtgatctaggctcgaccggggcgggggtacgctaggctcgaccggggcggggg

SEQ ID NO: 7714 - DNA, 125 bp, synthetic construct
  source 1..125: mol_type = other DNA
cccccgccccggtcgggccctgccgctcccccgccccggtcgggccctgctttcccccgccccggtcgggccctgatctcccccgccccggtcgggccctacgctcccccgccccggtcgggccc

SEQ ID NO: 7715 - DNA, 125 bp, synthetic construct
  source 1..125: mol_type = other DNA
gggcccgaccggggcgggggtgccgctgggcccgaccggggcgggggtgctttgggcccgaccggggcgggggtgatctgggcccgaccggggcgggggtacgctgggcccgaccggggcggggg

SEQ ID NO: 7716 - DNA, 125 bp, synthetic construct
  source 1..125: mol_type = other DNA
cccccgccccggtcgggccttgccgctcccccgccccggtcgggccttgctttcccccgccccggtcgggccttgatctcccccgccccggtcgggccttacgctcccccgccccggtcgggcct

SEQ ID NO: 7717 - DNA, 125 bp, synthetic construct
  source 1..125: mol_type = other DNA
aggcccgaccggggcgggggtgccgctaggcccgaccggggcgggggtgctttaggcccgaccggggcgggggtgatctaggcccgaccggggcgggggtacgctaggcccgaccggggcggggg

SEQ ID NO: 7718 - DNA, 125 bp, synthetic construct
  source 1..125: mol_type = other DNA
cccccgccccggtccagccctgccgctcccccgccccggtccagccctgctttcccccgccccggtccagccctgatctcccccgccccggtccagccctacgctcccccgccccggtccagccc

SEQ ID NO: 7719 - DNA, 125 bp, synthetic construct
  source 1..125: mol_type = other DNA
gggctggaccggggcgggggtgccgctgggctggaccggggcgggggtgctttgggctggaccggggcgggggtgatctgggctggaccggggcgggggtacgctgggctggaccggggcggggg

SEQ ID NO: 7720 - DNA, 125 bp, synthetic construct
  source 1..125: mol_type = other DNA
cccccgccccggtccagccttgccgctcccccgccccggtccagccttgctttcccccgccccggtccagccttgatctcccccgccccggtccagccttacgctcccccgccccggtccagcct

SEQ ID NO: 7721 - DNA, 125 bp, synthetic construct
  source 1..125: mol_type = other DNA
aggctggaccggggcgggggtgccgctaggctggaccggggcgggggtgctttaggctggaccggggcgggggtgatctaggctggaccggggcgggggtacgctaggctggaccggggcggggg

SEQ ID NO: 7722 - DNA, 125 bp, synthetic construct
  source 1..125: mol_type = other DNA
cccccgccccggtccggccctgccgctcccccgccccggtccggccctgctttcccccgccccggtccggccctgatctcccccgccccggtccggccctacgctcccccgccccggtccggccc

SEQ ID NO: 7723 - DNA, 125 bp, synthetic construct
  source 1..125: mol_type = other DNA
gggccggaccggggcgggggtgccgctgggccggaccggggcgggggtgctttgggccggaccggggcgggggtgatctgggccggaccggggcgggggtacgctgggccggaccggggcggggg

SEQ ID NO: 7724 - DNA, 125 bp, synthetic construct
  source 1..125: mol_type = other DNA
cccccgccccggtccggccttgccgctcccccgccccggtccggccttgctttcccccgccccggtccggccttgatctcccccgccccggtccggccttacgctcccccgccccggtccggcct

SEQ ID NO: 7725 - DNA, 125 bp, synthetic construct
  source 1..125: mol_type = other DNA
aggccggaccggggcgggggtgccgctaggccggaccggggcgggggtgctttaggccggaccggggcgggggtgatctaggccggaccggggcgggggtacgctaggccggaccggggcggggg

SEQ ID NO: 7726 - DNA, 125 bp, synthetic construct
  source 1..125: mol_type = other DNA
cccccgccccgctcgagccctgccgctcccccgccccgctcgagccctgctttcccccgccccgctcgagccctgatctcccccgccccgctcgagccctacgctcccccgccccgctcgagccc

SEQ ID NO: 7727 - DNA, 125 bp, synthetic construct
  source 1..125: mol_type = other DNA
gggctcgagcggggcgggggtgccgctgggctcgagcggggcgggggtgctttgggctcgagcggggcgggggtgatctgggctcgagcggggcgggggtacgctgggctcgagcggggcggggg

SEQ ID NO: 7728 - DNA, 125 bp, synthetic construct
  source 1..125: mol_type = other DNA
cccccgccccgctcgagccttgccgctcccccgccccgctcgagccttgctttcccccgccccgctcgagccttgatctcccccgccccgctcgagccttacgctcccccgccccgctcgagcct

SEQ ID NO: 7729 - DNA, 125 bp, synthetic construct
  source 1..125: mol_type = other DNA
aggctcgagcggggcgggggtgccgctaggctcgagcggggcgggggtgctttaggctcgagcggggcgggggtgatctaggctcgagcggggcgggggtacgctaggctcgagcggggcggggg

SEQ ID NO: 7730 - DNA, 125 bp, synthetic construct
  source 1..125: mol_type = other DNA
cccccgccccgctcgggccctgccgctcccccgccccgctcgggccctgctttcccccgccccgctcgggccctgatctcccccgccccgctcgggccctacgctcccccgccccgctcgggccc

SEQ ID NO: 7731 - DNA, 125 bp, synthetic construct
  source 1..125: mol_type = other DNA
gggcccgagcggggcgggggtgccgctgggcccgagcggggcgggggtgctttgggcccgagcggggcgggggtgatctgggcccgagcggggcgggggtacgctgggcccgagcggggcggggg

SEQ ID NO: 7732 - DNA, 125 bp, synthetic construct
  source 1..125: mol_type = other DNA
cccccgccccgctcgggccttgccgctcccccgccccgctcgggccttgctttcccccgccccgctcgggccttgatctcccccgccccgctcgggccttacgctcccccgccccgctcgggcct

SEQ ID NO: 7733 - DNA, 125 bp, synthetic construct
  source 1..125: mol_type = other DNA
aggcccgagcggggcgggggtgccgctaggcccgagcggggcgggggtgctttaggcccgagcggggcgggggtgatctaggcccgagcggggcgggggtacgctaggcccgagcggggcggggg

SEQ ID NO: 7734 - DNA, 125 bp, synthetic construct
  source 1..125: mol_type = other DNA
cccccgccccgctccagccctgccgctcccccgccccgctccagccctgctttcccccgccccgctccagccctgatctcccccgccccgctccagccctacgctcccccgccccgctccagccc

SEQ ID NO: 7735 - DNA, 125 bp, synthetic construct
  source 1..125: mol_type = other DNA
gggctggagcggggcgggggtgccgctgggctggagcggggcgggggtgctttgggctggagcggggcgggggtgatctgggctggagcggggcgggggtacgctgggctggagcggggcggggg

SEQ ID NO: 7736 - DNA, 125 bp, synthetic construct
  source 1..125: mol_type = other DNA
cccccgccccgctccagccttgccgctcccccgccccgctccagccttgctttcccccgccccgctccagccttgatctcccccgccccgctccagccttacgctcccccgccccgctccagcct

SEQ ID NO: 7737 - DNA, 125 bp, synthetic construct
  source 1..125: mol_type = other DNA
aggctggagcggggcgggggtgccgctaggctggagcggggcgggggtgctttaggctggagcggggcgggggtgatctaggctggagcggggcgggggtacgctaggctggagcggggcggggg

SEQ ID NO: 7738 - DNA, 125 bp, synthetic construct
  source 1..125: mol_type = other DNA
cccccgccccgctccggccctgccgctcccccgccccgctccggccctgctttcccccgccccgctccggccctgatctcccccgccccgctccggccctacgctcccccgccccgctccggccc

SEQ ID NO: 7739 - DNA, 125 bp, synthetic construct
  source 1..125: mol_type = other DNA
gggccggagcggggcgggggtgccgctgggccggagcggggcgggggtgctttgggccggagcggggcgggggtgatctgggccggagcggggcgggggtacgctgggccggagcggggcggggg

SEQ ID NO: 7740 - DNA, 125 bp, synthetic construct
  source 1..125: mol_type = other DNA
cccccgccccgctccggccttgccgctcccccgccccgctccggccttgctttcccccgccccgctccggccttgatctcccccgccccgctccggccttacgctcccccgccccgctccggcct

SEQ ID NO: 7741 - DNA, 125 bp, synthetic construct
  source 1..125: mol_type = other DNA
aggccggagcggggcgggggtgccgctaggccggagcggggcgggggtgctttaggccggagcggggcgggggtgatctaggccggagcggggcgggggtacgctaggccggagcggggcggggg

SEQ ID NO: 7742 - DNA, 125 bp, synthetic construct
  source 1..125: mol_type = other DNA
ccccctccccagtcgagccctgccgctccccctccccagtcgagccctgctttccccctccccagtcgagccctgatctccccctccccagtcgagccctacgctccccctccccagtcgagccc

SEQ ID NO: 7743 - DNA, 125 bp, synthetic construct
  source 1..125: mol_type = other DNA
gggctcgactggggagggggtgccgctgggctcgactggggagggggtgctttgggctcgactggggagggggtgatctgggctcgactggggagggggtacgctgggctcgactggggaggggg

SEQ ID NO: 7744 - DNA, 125 bp, synthetic construct
  source 1..125: mol_type = other DNA
ccccctccccagtcgagccttgccgctccccctccccagtcgagccttgctttccccctccccagtcgagccttgatctccccctccccagtcgagccttacgctccccctccccagtcgagcct

SEQ ID NO: 7745 - DNA, 125 bp, synthetic construct
  source 1..125: mol_type = other DNA
aggctcgactggggagggggtgccgctaggctcgactggggagggggtgctttaggctcgactggggagggggtgatctaggctcgactggggagggggtacgctaggctcgactggggaggggg

SEQ ID NO: 7746 - DNA, 125 bp, synthetic construct
  source 1..125: mol_type = other DNA
ccccctccccagtcgggccctgccgctccccctccccagtcgggccctgctttccccctccccagtcgggccctgatctccccctccccagtcgggccctacgctccccctccccagtcgggccc

SEQ ID NO: 7747 - DNA, 125 bp, synthetic construct
  source 1..125: mol_type = other DNA
gggcccgactggggagggggtgccgctgggcccgactggggagggggtgctttgggcccgactggggagggggtgatctgggcccgactggggagggggtacgctgggcccgactggggaggggg

SEQ ID NO: 7748 - DNA, 125 bp, synthetic construct
  source 1..125: mol_type = other DNA
ccccctccccagtcgggccttgccgctccccctccccagtcgggccttgctttccccctccccagtcgggccttgatctccccctccccagtcgggccttacgctccccctccccagtcgggcct

SEQ ID NO: 7749 - DNA, 125 bp, synthetic construct
  source 1..125: mol_type = other DNA
aggcccgactggggagggggtgccgctaggcccgactggggagggggtgctttaggcccgactggggagggggtgatctaggcccgactggggagggggtacgctaggcccgactggggaggggg

SEQ ID NO: 7750 - DNA, 125 bp, synthetic construct
  source 1..125: mol_type = other DNA
ccccctccccagtccagccctgccgctccccctccccagtccagccctgctttccccctccccagtccagccctgatctccccctccccagtccagccctacgctccccctccccagtccagccc

SEQ ID NO: 7751 - DNA, 125 bp, synthetic construct
  source 1..125: mol_type = other DNA
gggctggactggggagggggtgccgctgggctggactggggagggggtgctttgggctggactggggagggggtgatctgggctggactggggagggggtacgctgggctggactggggaggggg

SEQ ID NO: 7752 - DNA, 125 bp, synthetic construct
  source 1..125: mol_type = other DNA
ccccctccccagtccagccttgccgctccccctccccagtccagccttgctttccccctccccagtccagccttgatctccccctccccagtccagccttacgctccccctccccagtccagcct

SEQ ID NO: 7753 - DNA, 125 bp, synthetic construct
  source 1..125: mol_type = other DNA
aggctggactggggagggggtgccgctaggctggactggggagggggtgctttaggctggactggggagggggtgatctaggctggactggggagggggtacgctaggctggactggggaggggg

SEQ ID NO: 7754 - DNA, 125 bp, synthetic construct
  source 1..125: mol_type = other DNA
ccccctccccagtccggccctgccgctccccctccccagtccggccctgctttccccctccccagtccggccctgatctccccctccccagtccggccctacgctccccctccccagtccggccc

SEQ ID NO: 7755 - DNA, 125 bp, synthetic construct
  source 1..125: mol_type = other DNA
gggccggactggggagggggtgccgctgggccggactggggagggggtgctttgggccggactggggagggggtgatctgggccggactggggagggggtacgctgggccggactggggaggggg

SEQ ID NO: 7756 - DNA, 125 bp, synthetic construct
  source 1..125: mol_type = other DNA
ccccctccccagtccggccttgccgctccccctccccagtccggccttgctttccccctccccagtccggccttgatctccccctccccagtccggccttacgctccccctccccagtccggcct

SEQ ID NO: 7757 - DNA, 125 bp, synthetic construct
  source 1..125: mol_type = other DNA
aggccggactggggagggggtgccgctaggccggactggggagggggtgctttaggccggactggggagggggtgatctaggccggactggggagggggtacgctaggccggactggggaggggg

SEQ ID NO: 7758 - DNA, 125 bp, synthetic construct
  source 1..125: mol_type = other DNA
ccccctccccactcgagccctgccgctccccctccccactcgagccctgctttccccctccccactcgagccctgatctccccctccccactcgagccctacgctccccctccccactcgagccc

SEQ ID NO: 7759 - DNA, 125 bp, synthetic construct
  source 1..125: mol_type = other DNA
gggctcgagtggggagggggtgccgctgggctcgagtggggagggggtgctttgggctcgagtggggagggggtgatctgggctcgagtggggagggggtacgctgggctcgagtggggaggggg

SEQ ID NO: 7760 - DNA, 125 bp, synthetic construct
  source 1..125: mol_type = other DNA
ccccctccccactcgagccttgccgctccccctccccactcgagccttgctttccccctccccactcgagccttgatctccccctccccactcgagccttacgctccccctccccactcgagcct

SEQ ID NO: 7761 - DNA, 125 bp, synthetic construct
  source 1..125: mol_type = other DNA
aggctcgagtggggagggggtgccgctaggctcgagtggggagggggtgctttaggctcgagtggggagggggtgatctaggctcgagtggggagggggtacgctaggctcgagtggggaggggg

SEQ ID NO: 7762 - DNA, 125 bp, synthetic construct
  source 1..125: mol_type = other DNA
ccccctccccactcgggccctgccgctccccctccccactcgggccctgctttccccctccccactcgggccctgatctccccctccccactcgggccctacgctccccctccccactcgggccc

SEQ ID NO: 7763 - DNA, 125 bp, synthetic construct
  source 1..125: mol_type = other DNA
gggcccgagtggggagggggtgccgctgggcccgagtggggagggggtgctttgggcccgagtggggagggggtgatctgggcccgagtggggagggggtacgctgggcccgagtggggaggggg

SEQ ID NO: 7764 - DNA, 125 bp, synthetic construct
  source 1..125: mol_type = other DNA
ccccctccccactcgggccttgccgctccccctccccactcgggccttgctttccccctccccactcgggccttgatctccccctccccactcgggccttacgctccccctccccactcgggcct

SEQ ID NO: 7765 - DNA, 125 bp, synthetic construct
  source 1..125: mol_type = other DNA
aggcccgagtggggagggggtgccgctaggcccgagtggggagggggtgctttaggcccgagtggggagggggtgatctaggcccgagtggggagggggtacgctaggcccgagtggggaggggg

SEQ ID NO: 7766 - DNA, 125 bp, synthetic construct
  source 1..125: mol_type = other DNA
ccccctccccactccagccctgccgctccccctccccactccagccctgctttccccctccccactccagccctgatctccccctccccactccagccctacgctccccctccccactccagccc

SEQ ID NO: 7767 - DNA, 125 bp, synthetic construct
  source 1..125: mol_type = other DNA
gggctggagtggggagggggtgccgctgggctggagtggggagggggtgctttgggctggagtggggagggggtgatctgggctggagtggggagggggtacgctgggctggagtggggaggggg

SEQ ID NO: 7768 - DNA, 125 bp, synthetic construct
  source 1..125: mol_type = other DNA
ccccctccccactccagccttgccgctccccctccccactccagccttgctttccccctccccactccagccttgatctccccctccccactccagccttacgctccccctccccactccagcct

SEQ ID NO: 7769 - DNA, 125 bp, synthetic construct
  source 1..125: mol_type = other DNA
aggctggagtggggagggggtgccgctaggctggagtggggagggggtgctttaggctggagtggggagggggtgatctaggctggagtggggagggggtacgctaggctggagtggggaggggg

SEQ ID NO: 7770 - DNA, 125 bp, synthetic construct
  source 1..125: mol_type = other DNA
ccccctccccactccggccctgccgctccccctccccactccggccctgctttccccctccccactccggccctgatctccccctccccactccggccctacgctccccctccccactccggccc

SEQ ID NO: 7771 - DNA, 125 bp, synthetic construct
  source 1..125: mol_type = other DNA
gggccggagtggggagggggtgccgctgggccggagtggggagggggtgctttgggccggagtggggagggggtgatctgggccggagtggggagggggtacgctgggccggagtggggaggggg

SEQ ID NO: 7772 - DNA, 125 bp, synthetic construct
  source 1..125: mol_type = other DNA
ccccctccccactccggccttgccgctccccctccccactccggccttgctttccccctccccactccggccttgatctccccctccccactccggccttacgctccccctccccactccggcct

SEQ ID NO: 7773 - DNA, 125 bp, synthetic construct
  source 1..125: mol_type = other DNA
aggccggagtggggagggggtgccgctaggccggagtggggagggggtgctttaggccggagtggggagggggtgatctaggccggagtggggagggggtacgctaggccggagtggggaggggg

SEQ ID NO: 7774 - DNA, 125 bp, synthetic construct
  source 1..125: mol_type = other DNA
ccccctccccggtcgagccctgccgctccccctccccggtcgagccctgctttccccctccccggtcgagccctgatctccccctccccggtcgagccctacgctccccctccccggtcgagccc

SEQ ID NO: 7775 - DNA, 125 bp, synthetic construct
  source 1..125: mol_type = other DNA
gggctcgaccggggagggggtgccgctgggctcgaccggggagggggtgctttgggctcgaccggggagggggtgatctgggctcgaccggggagggggtacgctgggctcgaccggggaggggg

SEQ ID NO: 7776 - DNA, 125 bp, synthetic construct
  source 1..125: mol_type = other DNA
ccccctccccggtcgagccttgccgctccccctccccggtcgagccttgctttccccctccccggtcgagccttgatctccccctccccggtcgagccttacgctccccctccccggtcgagcct

SEQ ID NO: 7777 - DNA, 125 bp, synthetic construct
  source 1..125: mol_type = other DNA
aggctcgaccggggagggggtgccgctaggctcgaccggggagggggtgctttaggctcgaccggggagggggtgatctaggctcgaccggggagggggtacgctaggctcgaccggggaggggg

SEQ ID NO: 7778 - DNA, 125 bp, synthetic construct
  source 1..125: mol_type = other DNA
ccccctccccggtcgggccctgccgctccccctccccggtcgggccctgctttccccctccccggtcgggccctgatctccccctccccggtcgggccctacgctccccctccccggtcgggccc

SEQ ID NO: 7779 - DNA, 125 bp, synthetic construct
  source 1..125: mol_type = other DNA
gggcccgaccggggagggggtgccgctgggcccgaccggggagggggtgctttgggcccgaccggggagggggtgatctgggcccgaccggggagggggtacgctgggcccgaccggggaggggg

SEQ ID NO: 7780 - DNA, 125 bp, synthetic construct
  source 1..125: mol_type = other DNA
ccccctccccggtcgggccttgccgctccccctccccggtcgggccttgctttccccctccccggtcgggccttgatctccccctccccggtcgggccttacgctccccctccccggtcgggcct

SEQ ID NO: 7781 - DNA, 125 bp, synthetic construct
  source 1..125: mol_type = other DNA
aggcccgaccggggagggggtgccgctaggcccgaccggggagggggtgctttaggcccgaccggggagggggtgatctaggcccgaccggggagggggtacgctaggcccgaccggggaggggg

SEQ ID NO: 7782 - DNA, 125 bp, synthetic construct
  source 1..125: mol_type = other DNA
ccccctccccggtccagccctgccgctccccctccccggtccagccctgctttccccctccccggtccagccctgatctccccctccccggtccagccctacgctccccctccccggtccagccc

SEQ ID NO: 7783 - DNA, 125 bp, synthetic construct
  source 1..125: mol_type = other DNA
gggctggaccggggagggggtgccgctgggctggaccggggagggggtgctttgggctggaccggggagggggtgatctgggctggaccggggagggggtacgctgggctggaccggggaggggg

SEQ ID NO: 7784 - DNA, 125 bp, synthetic construct
  source 1..125: mol_type = other DNA
ccccctccccggtccagccttgccgctccccctccccggtccagccttgctttccccctccccggtccagccttgatctccccctccccggtccagccttacgctccccctccccggtccagcct

SEQ ID NO: 7785 - DNA, 125 bp, synthetic construct
  source 1..125: mol_type = other DNA
aggctggaccggggagggggtgccgctaggctggaccggggagggggtgctttaggctggaccggggagggggtgatctaggctggaccggggagggggtacgctaggctggaccggggaggggg

SEQ ID NO: 7786 - DNA, 125 bp, synthetic construct
  source 1..125: mol_type = other DNA
ccccctccccggtccggccctgccgctccccctccccggtccggccctgctttccccctccccggtccggccctgatctccccctccccggtccggccctacgctccccctccccggtccggccc

SEQ ID NO: 7787 - DNA, 125 bp, synthetic construct
  source 1..125: mol_type = other DNA
gggccggaccggggagggggtgccgctgggccggaccggggagggggtgctttgggccggaccggggagggggtgatctgggccggaccggggagggggtacgctgggccggaccggggaggggg

SEQ ID NO: 7788 - DNA, 125 bp, synthetic construct
  source 1..125: mol_type = other DNA
ccccctccccggtccggccttgccgctccccctccccggtccggccttgctttccccctccccggtccggccttgatctccccctccccggtccggccttacgctccccctccccggtccggcct

SEQ ID NO: 7789 - DNA, 125 bp, synthetic construct
  source 1..125: mol_type = other DNA
aggccggaccggggagggggtgccgctaggccggaccggggagggggtgctttaggccggaccggggagggggtgatctaggccggaccggggagggggtacgctaggccggaccggggaggggg

SEQ ID NO: 7790 - DNA, 125 bp, synthetic construct
  source 1..125: mol_type = other DNA
ccccctccccgctcgagccctgccgctccccctccccgctcgagccctgctttccccctccccgctcgagccctgatctccccctccccgctcgagccctacgctccccctccccgctcgagccc

SEQ ID NO: 7791 - DNA, 125 bp, synthetic construct
  source 1..125: mol_type = other DNA
gggctcgagcggggagggggtgccgctgggctcgagcggggagggggtgctttgggctcgagcggggagggggtgatctgggctcgagcggggagggggtacgctgggctcgagcggggaggggg

SEQ ID NO: 7792 - DNA, 125 bp, synthetic construct
  source 1..125: mol_type = other DNA
ccccctccccgctcgagccttgccgctccccctccccgctcgagccttgctttccccctccccgctcgagccttgatctccccctccccgctcgagccttacgctccccctccccgctcgagcct

SEQ ID NO: 7793 - DNA, 125 bp, synthetic construct
  source 1..125: mol_type = other DNA
aggctcgagcggggagggggtgccgctaggctcgagcggggagggggtgctttaggctcgagcggggagggggtgatctaggctcgagcggggagggggtacgctaggctcgagcggggaggggg

SEQ ID NO: 7794 - DNA, 125 bp, synthetic construct
  source 1..125: mol_type = other DNA
ccccctccccgctcgggccctgccgctccccctccccgctcgggccctgctttccccctccccgctcgggccctgatctccccctccccgctcgggccctacgctccccctccccgctcgggccc

SEQ ID NO: 7795 - DNA, 125 bp, synthetic construct
  source 1..125: mol_type = other DNA
gggcccgagcggggagggggtgccgctgggcccgagcggggagggggtgctttgggcccgagcggggagggggtgatctgggcccgagcggggagggggtacgctgggcccgagcggggaggggg

SEQ ID NO: 7796 - DNA, 125 bp, synthetic construct
  source 1..125: mol_type = other DNA
ccccctccccgctcgggccttgccgctccccctccccgctcgggccttgctttccccctccccgctcgggccttgatctccccctccccgctcgggccttacgctccccctccccgctcgggcct

SEQ ID NO: 7797 - DNA, 125 bp, synthetic construct
  source 1..125: mol_type = other DNA
aggcccgagcggggagggggtgccgctaggcccgagcggggagggggtgctttaggcccgagcggggagggggtgatctaggcccgagcggggagggggtacgctaggcccgagcggggaggggg

SEQ ID NO: 7798 - DNA, 125 bp, synthetic construct
  source 1..125: mol_type = other DNA
ccccctccccgctccagccctgccgctccccctccccgctccagccctgctttccccctccccgctccagccctgatctccccctccccgctccagccctacgctccccctccccgctccagccc

SEQ ID NO: 7799 - DNA, 125 bp, synthetic construct
  source 1..125: mol_type = other DNA
gggctggagcggggagggggtgccgctgggctggagcggggagggggtgctttgggctggagcggggagggggtgatctgggctggagcggggagggggtacgctgggctggagcggggaggggg

SEQ ID NO: 7800 - DNA, 125 bp, synthetic construct
  source 1..125: mol_type = other DNA
ccccctccccgctccagccttgccgctccccctccccgctccagccttgctttccccctccccgctccagccttgatctccccctccccgctccagccttacgctccccctccccgctccagcct

SEQ ID NO: 7801 - DNA, 125 bp, synthetic construct
  source 1..125: mol_type = other DNA
aggctggagcggggagggggtgccgctaggctggagcggggagggggtgctttaggctggagcggggagggggtgatctaggctggagcggggagggggtacgctaggctggagcggggaggggg

SEQ ID NO: 7802 - DNA, 125 bp, synthetic construct
  source 1..125: mol_type = other DNA
ccccctccccgctccggccctgccgctccccctccccgctccggccctgctttccccctccccgctccggccctgatctccccctccccgctccggccctacgctccccctccccgctccggccc

SEQ ID NO: 7803 - DNA, 125 bp, synthetic construct
  source 1..125: mol_type = other DNA
gggccggagcggggagggggtgccgctgggccggagcggggagggggtgctttgggccggagcggggagggggtgatctgggccggagcggggagggggtacgctgggccggagcggggaggggg

SEQ ID NO: 7804 - DNA, 125 bp, synthetic construct
  source 1..125: mol_type = other DNA
ccccctccccgctccggccttgccgctccccctccccgctccggccttgctttccccctccccgctccggccttgatctccccctccccgctccggccttacgctccccctccccgctccggcct

SEQ ID NO: 7805 - DNA, 125 bp, synthetic construct
  source 1..125: mol_type = other DNA
aggccggagcggggagggggtgccgctaggccggagcggggagggggtgctttaggccggagcggggagggggtgatctaggccggagcggggagggggtacgctaggccggagcggggaggggg

SEQ ID NO: 7806 - DNA, 140 bp, synthetic construct
  source 1..140: mol_type = other DNA
aacatatggctgccgctaacatatggctgctttaacatatggctgatctaacatatggctacgctaacatatggctgccgctaacatatggctgctttaacatatggctgatctaacatatggctacgctaacatatggc

SEQ ID NO: 7807 - DNA, 140 bp, synthetic construct
  source 1..140: mol_type = other DNA
gccatatgtttgccgctgccatatgtttgctttgccatatgtttgatctgccatatgtttacgctgccatatgtttgccgctgccatatgtttgctttgccatatgtttgatctgccatatgtttacgctgccatatgtt

SEQ ID NO: 7808 - DNA, 140 bp, synthetic construct
  source 1..140: mol_type = other DNA
aacatatggttgccgctaacatatggttgctttaacatatggttgatctaacatatggttacgctaacatatggttgccgctaacatatggttgctttaacatatggttgatctaacatatggttacgctaacatatggt

SEQ ID NO: 7809 - DNA, 140 bp, synthetic construct
  source 1..140: mol_type = other DNA
accatatgtttgccgctaccatatgtttgctttaccatatgtttgatctaccatatgtttacgctaccatatgtttgccgctaccatatgtttgctttaccatatgtttgatctaccatatgtttacgctaccatatgtt

SEQ ID NO: 7810 - DNA, 140 bp, synthetic construct
  source 1..140: mol_type = other DNA
accatatggctgccgctaccatatggctgctttaccatatggctgatctaccatatggctacgctaccatatggctgccgctaccatatggctgctttaccatatggctgatctaccatatggctacgctaccatatggc

SEQ ID NO: 7811 - DNA, 140 bp, synthetic construct
  source 1..140: mol_type = other DNA
gccatatggttgccgctgccatatggttgctttgccatatggttgatctgccatatggttacgctgccatatggttgccgctgccatatggttgctttgccatatggttgatctgccatatggttacgctgccatatggt

SEQ ID NO: 7812 - DNA, 140 bp, synthetic construct
  source 1..140: mol_type = other DNA
accatatggttgccgctaccatatggttgctttaccatatggttgatctaccatatggttacgctaccatatggttgccgctaccatatggttgctttaccatatggttgatctaccatatggttacgctaccatatggt

SEQ ID NO: 7813 - DNA, 140 bp, synthetic construct; identical to SEQ ID NO: 7812
  source 1..140: mol_type = other DNA

SEQ ID NO: 7814 - DNA, 140 bp, synthetic construct
  source 1..140: mol_type = other DNA
ccacacccactgccgctccacacccactgctttccacacccactgatctccacacccactacgctccacacccactgccgctccacacccactgctttccacacccactgatctccacacccactacgctccacacccac

SEQ ID NO: 7815 - DNA, 140 bp, synthetic construct
  source 1..140: mol_type = other DNA
gtgggtgtggtgccgctgtgggtgtggtgctttgtgggtgtggtgatctgtgggtgtggtacgctgtgggtgtggtgccgctgtgggtgtggtgctttgtgggtgtggtgatctgtgggtgtggtacgctgtgggtgtgg

SEQ ID NO: 7816 - DNA, 145 bp, synthetic construct
  source 1..145: mol_type = other DNA
cttaatctacatttaacactacgctcttaatctacatttaacactgccgctcttaatctacatttaacactgctttcttaatctacatttaacactgatctcttaatctacatttaacactacgctcttaatctacatttaacac

SEQ ID NO: 7817 - DNA, 145 bp, synthetic construct
  source 1..145: mol_type = other DNA
gtgttaaatgtagattaagtacgctgtgttaaatgtagattaagtgccgctgtgttaaatgtagattaagtgctttgtgttaaatgtagattaagtgatctgtgttaaatgtagattaagtacgctgtgttaaatgtagattaag

SEQ ID NO: 7818 - DNA, 145 bp, synthetic construct
  source 1..145: mol_type = other DNA
cttaatctacatttaacattacgctcttaatctacatttaacattgccgctcttaatctacatttaacattgctttcttaatctacatttaacattgatctcttaatctacatttaacattacgctcttaatctacatttaacat

SEQ ID NO: 7819 - DNA, 145 bp, synthetic construct
  source 1..145: mol_type = other DNA
atgttaaatgtagattaagtacgctatgttaaatgtagattaagtgccgctatgttaaatgtagattaagtgctttatgttaaatgtagattaagtgatctatgttaaatgtagattaagtacgctatgttaaatgtagattaag

SEQ ID NO: 7820 - DNA, 145 bp, synthetic construct
  source 1..145: mol_type = other DNA
cttaatctacgtttaacactacgctcttaatctacgtttaacactgccgctcttaatctacgtttaacactgctttcttaatctacgtttaacactgatctcttaatctacgtttaacactacgctcttaatctacgtttaacac

SEQ ID NO: 7821 - DNA, 145 bp, synthetic construct
  source 1..145: mol_type = other DNA
gtgttaaacgtagattaagtacgctgtgttaaacgtagattaagtgccgctgtgttaaacgtagattaagtgctttgtgttaaacgtagattaagtgatctgtgttaaacgtagattaagtacgctgtgttaaacgtagattaag

SEQ ID NO: 7822 - DNA, 145 bp, synthetic construct
  source 1..145: mol_type = other DNA
cttaatctacgtttaacattacgctcttaatctacgtttaacattgccgctcttaatctacgtttaacattgctttcttaatctacgtttaacattgatctcttaatctacgtttaacattacgctcttaatctacgtttaacat

SEQ ID NO: 7823 - DNA, 145 bp, synthetic construct
  source 1..145: mol_type = other DNA
atgttaaacgtagattaagtacgctatgttaaacgtagattaagtgccgctatgttaaacgtagattaagtgctttatgttaaacgtagattaagtgatctatgttaaacgtagattaagtacgctatgttaaacgtagattaag

SEQ ID NO: 7824 - DNA, 140 bp, synthetic construct
  source 1..140: mol_type = other DNA
atcacgtgactgccgctatcacgtgactgctttatcacgtgactgatctatcacgtgactacgctatcacgtgactgccgctatcacgtgactgctttatcacgtgactgatctatcacgtgactacgctatcacgtgac

SEQ ID NO: 7825 - DNA, 140 bp, synthetic construct
  source 1..140: mol_type = other DNA
gtcacgtgattgccgctgtcacgtgattgctttgtcacgtgattgatctgtcacgtgattacgctgtcacgtgattgccgctgtcacgtgattgctttgtcacgtgattgatctgtcacgtgattacgctgtcacgtgat

SEQ ID NO: 7826 - DNA, 140 bp, synthetic construct
  source 1..140: mol_type = other DNA
atcacgtgattgccgctatcacgtgattgctttatcacgtgattgatctatcacgtgattacgctatcacgtgattgccgctatcacgtgattgctttatcacgtgattgatctatcacgtgattacgctatcacgtgat

SEQ ID NO: 7827 - DNA, 140 bp, synthetic construct; identical to SEQ ID NO: 7826
  source 1..140: mol_type = other DNA

SEQ ID NO: 7828 - DNA, 140 bp, synthetic construct
  source 1..140: mol_type = other DNA
gtcacgtgactgccgctgtcacgtgactgctttgtcacgtgactgatctgtcacgtgactacgctgtcacgtgactgccgctgtcacgtgactgctttgtcacgtgactgatctgtcacgtgactacgctgtcacgtgac

SEQ ID NO: 7829 - DNA, 140 bp, synthetic construct; identical to SEQ ID NO: 7828
  source 1..140: mol_type = other DNA

SEQ ID NO: 7830 - DNA, 140 bp, synthetic construct; identical to SEQ ID NO: 7825
  source 1..140: mol_type = other DNA

SEQ ID NO: 7831 - DNA, 140 bp, synthetic construct; identical to SEQ ID NO: 7824
  source 1..140: mol_type = other DNA

SEQ ID NO: 7832 - DNA, 149 bp, synthetic construct
  source 1..149: mol_type = other DNA
caccccctccctgccgctcaccccctccctgctttcaccccctccctgatctcaccccctccctacgctcaccccctccctgccgctcaccccctccctgctttcaccccctccctgatctcaccccctccctacgctcaccccctccc

SEQ ID NO: 7833 - DNA, 149 bp, synthetic construct
  source 1..149: mol_type = other DNA
gggagggggtgtgccgctgggagggggtgtgctttgggagggggtgtgatctgggagggggtgtacgctgggagggggtgtgccgctgggagggggtgtgctttgggagggggtgtgatctgggagggggtgtacgctgggagggggtg

SEQ ID NO: 7834 - DNA, 149 bp, synthetic construct
  source 1..149: mol_type = other DNA
cgccccctccctgccgctcgccccctccctgctttcgccccctccctgatctcgccccctccctacgctcgccccctccctgccgctcgccccctccctgctttcgccccctccctgatctcgccccctccctacgctcgccccctccc

SEQ ID NO: 7835 - DNA, 149 bp, synthetic construct
  source 1..149: mol_type = other DNA
gggagggggcgtgccgctgggagggggcgtgctttgggagggggcgtgatctgggagggggcgtacgctgggagggggcgtgccgctgggagggggcgtgctttgggagggggcgtgatctgggagggggcgtacgctgggagggggcg

SEQ ID NO: 7836 - DNA, 135 bp, synthetic construct
  source 1..135: mol_type = other DNA
acagtccacccctttgatctacagtccacccctttacgctacagtccacccctttgccgctacagtccacccctttgctttacagtccacccctttgatctacagtccacccctttacgctacagtccacccctt

SEQ ID NO: 7837 - DNA, 135 bp, synthetic construct
  source 1..135: mol_type = other DNA
aaggggtggactgttgatctaaggggtggactgttacgctaaggggtggactgttgccgctaaggggtggactgttgctttaaggggtggactgttgatctaaggggtggactgttacgctaaggggtggactgt

SEQ ID NO: 7838 - DNA, 146 bp, synthetic construct; identical to SEQ ID NO: 6666
  source 1..146: mol_type = other DNA

SEQ ID NO: 7839 - DNA, 146 bp, synthetic construct; identical to SEQ ID NO: 6667
  source 1..146: mol_type = other DNA

SEQ ID NO: 7840 - DNA, 146 bp, synthetic construct
  source 1..146: mol_type = other DNA
aacagctgctacgctaacagctgctgccgctaacagctgctgctttaacagctgctgatctaacagctgctacgctaacagctgctgccgctaacagctgctgctttaacagctgctgatctaacagctgctacgctaacagctgc

SEQ ID NO: 7841 - DNA, 146 bp, synthetic construct
  source 1..146: mol_type = other DNA
gcagctgtttacgctgcagctgtttgccgctgcagctgtttgctttgcagctgtttgatctgcagctgtttacgctgcagctgtttgccgctgcagctgtttgctttgcagctgtttgatctgcagctgtttacgctgcagctgtt

SEQ ID NO: 7842 - DNA, 146 bp, synthetic construct; identical to SEQ ID NO: 6586
  source 1..146: mol_type = other DNA

SEQ ID NO: 7843 - DNA, 146 bp, synthetic construct; identical to SEQ ID NO: 6587
  source 1..146: mol_type = other DNA

SEQ ID NO: 7844 - DNA, 146 bp, synthetic construct; identical to SEQ ID NO: 6588
  source 1..146: mol_type = other DNA

SEQ ID NO: 7845 - DNA, 146 bp, synthetic construct; identical to SEQ ID NO: 6589
  source 1..146: mol_type = other DNA

SEQ ID NO: 7846 - DNA, 146 bp, synthetic construct
  source 1..146: mol_type = other DNA
accagctgctacgctaccagctgctgccgctaccagctgctgctttaccagctgctgatctaccagctgctacgctaccagctgctgccgctaccagctgctgctttaccagctgctgatctaccagctgctacgctaccagctgc

SEQ ID NO: 7847 - DNA, 146 bp, synthetic construct
  source 1..146: mol_type = other DNA
gcagctggttacgctgcagctggttgccgctgcagctggttgctttgcagctggttgatctgcagctggttacgctgcagctggttgccgctgcagctggttgctttgcagctggttgatctgcagctggttacgctgcagctggt

SEQ ID NO: 7848 - DNA, 146 bp, synthetic construct; identical to SEQ ID NO: 6592
  source 1..146: mol_type = other DNA

SEQ ID NO: 7849 - DNA, 146 bp, synthetic construct; identical to SEQ ID NO: 6593
  source 1..146: mol_type = other DNA

SEQ ID NO: 7850 - DNA, 146 bp, synthetic construct; identical to SEQ ID NO: 6594
  source 1..146: mol_type = other DNA

SEQ ID NO: 7851 - DNA, 146 bp, synthetic construct; identical to SEQ ID NO: 6595
  source 1..146: mol_type = other DNA

SEQ ID NO: 7852 - DNA, 146 bp, synthetic construct; identical to SEQ ID NO: 6376
  source 1..146: mol_type = other DNA

SEQ ID NO: 7853 - DNA, 146 bp, synthetic construct; identical to SEQ ID NO: 6377
  source 1..146: mol_type = other DNA

SEQ ID NO: 7854 - DNA, 146 bp, synthetic construct; identical to SEQ ID NO: 6374
  source 1..146: mol_type = other DNA

SEQ ID NO: 7855 - DNA, 146 bp, synthetic construct; identical to SEQ ID NO: 6375
  source 1..146: mol_type = other DNA

SEQ ID NO: 7856 - DNA, 146 bp, synthetic construct
  source 1..146: mol_type = other DNA
agcagctgttacgctagcagctgttgccgctagcagctgttgctttagcagctgttgatctagcagctgttacgctagcagctgttgccgctagcagctgttgctttagcagctgttgatctagcagctgttacgctagcagctgt

SEQ ID NO: 7857 - DNA, 146 bp, synthetic construct
  source 1..146: mol_type = other DNA
acagctgcttacgctacagctgcttgccgctacagctgcttgctttacagctgcttgatctacagctgcttacgctacagctgcttgccgctacagctgcttgctttacagctgcttgatctacagctgcttacgctacagctgct

SEQ ID NO: 7858 - DNA, 146 bp, synthetic construct
  source 1..146: mol_type = other DNA
cacagctgctacgctcacagctgctgccgctcacagctgctgctttcacagctgctgatctcacagctgctacgctcacagctgctgccgctcacagctgctgctttcacagctgctgatctcacagctgctacgctcacagctgc

SEQ ID NO: 7859 - DNA, 146 bp, synthetic construct
  source 1..146: mol_type = other DNA
gcagctgtgtacgctgcagctgtgtgccgctgcagctgtgtgctttgcagctgtgtgatctgcagctgtgtacgctgcagctgtgtgccgctgcagctgtgtgctttgcagctgtgtgatctgcagctgtgtacgctgcagctgtg

SEQ ID NO: 7860 - DNA, 146 bp, synthetic construct
  source 1..146: mol_type = other DNA
cacagctggtacgctcacagctggtgccgctcacagctggtgctttcacagctggtgatctcacagctggtacgctcacagctggtgccgctcacagctggtgctttcacagctggtgatctcacagctggtacgctcacagctgg

SEQ ID NO: 7861 - DNA, 146 bp, synthetic construct
  source 1..146: mol_type = other DNA
ccagctgtgtacgctccagctgtgtgccgctccagctgtgtgctttccagctgtgtgatctccagctgtgtacgctccagctgtgtgccgctccagctgtgtgctttccagctgtgtgatctccagctgtgtacgctccagctgtg

SEQ ID NO: 7862 - DNA, 146 bp, synthetic construct
  source 1..146: mol_type = other DNA
cacagctgttacgctcacagctgttgccgctcacagctgttgctttcacagctgttgatctcacagctgttacgctcacagctgttgccgctcacagctgttgctttcacagctgttgatctcacagctgttacgctcacagctgt

SEQ ID NO: 7863 - DNA, 146 bp, synthetic construct
  source 1..146: mol_type = other DNA
acagctgtgtacgctacagctgtgtgccgctacagctgtgtgctttacagctgtgtgatctacagctgtgtacgctacagctgtgtgccgctacagctgtgtgctttacagctgtgtgatctacagctgtgtacgctacagctgtg

SEQ ID NO: 7864 - DNA, 146 bp, synthetic construct
  source 1..146: mol_type = other DNA
cccagctgctacgctcccagctgctgccgctcccagctgctgctttcccagctgctgatctcccagctgctacgctcccagctgctgccgctcccagctgctgctttcccagctgctgatctcccagctgctacgctcccagctgc

SEQ ID NO: 7865 - DNA, 146 bp, synthetic construct
  source 1..146: mol_type = other DNA
gcagctgggtacgctgcagctgggtgccgctgcagctgggtgctttgcagctgggtgatctgcagctgggtacgctgcagctgggtgccgctgcagctgggtgctttgcagctgggtgatctgcagctgggtacgctgcagctggg

SEQ ID NO: 7866 - DNA, 146 bp, synthetic construct
  source 1..146: mol_type = other DNA
cccagctggtacgctcccagctggtgccgctcccagctggtgctttcccagctggtgatctcccagctggtacgctcccagctggtgccgctcccagctggtgctttcccagctggtgatctcccagctggtacgctcccagctgg

SEQ ID NO: 7867 - DNA, 146 bp, synthetic construct
  source 1..146: mol_type = other DNA
ccagctgggtacgctccagctgggtgccgctccagctgggtgctttccagctgggtgatctccagctgggtacgctccagctgggtgccgctccagctgggtgctttccagctgggtgatctccagctgggtacgctccagctggg

SEQ ID NO: 7868 - DNA, 146 bp, synthetic construct
  source 1..146: mol_type = other DNA
cccagctgttacgctcccagctgttgccgctcccagctgttgctttcccagctgttgatctcccagctgttacgctcccagctgttgccgctcccagctgttgctttcccagctgttgatctcccagctgttacgctcccagctgt

SEQ ID NO: 7869 - DNA, 146 bp, synthetic construct
  source 1..146: mol_type = other DNA
acagctgggtacgctacagctgggtgccgctacagctgggtgctttacagctgggtgatctacagctgggtacgctacagctgggtgccgctacagctgggtgctttacagctgggtgatctacagctgggtacgctacagctggg

SEQ ID NO: 7870 - DNA, 146 bp, synthetic construct
  source 1..146: mol_type = other DNA
cgcagctgctacgctcgcagctgctgccgctcgcagctgctgctttcgcagctgctgatctcgcagctgctacgctcgcagctgctgccgctcgcagctgctgctttcgcagctgctgatctcgcagctgctacgctcgcagctgc

SEQ ID NO: 7871 - DNA, 146 bp, synthetic construct
  source 1..146: mol_type = other DNA
gcagctgcgtacgctgcagctgcgtgccgctgcagctgcgtgctttgcagctgcgtgatctgcagctgcgtacgctgcagctgcgtgccgctgcagctgcgtgctttgcagctgcgtgatctgcagctgcgtacgctgcagctgcg

SEQ ID NO: 7872 - DNA, 146 bp, synthetic construct
  source 1..146: mol_type = other DNA
cgcagctggtacgctcgcagctggtgccgctcgcagctggtgctttcgcagctggtgatctcgcagctggtacgctcgcagctggtgccgctcgcagctggtgctttcgcagctggtgatctcgcagctggtacgctcgcagctgg

SEQ ID NO: 7873 - DNA, 146 bp, synthetic construct
  source 1..146: mol_type = other DNA
ccagctgcgtacgctccagctgcgtgccgctccagctgcgtgctttccagctgcgtgatctccagctgcgtacgctccagctgcgtgccgctccagctgcgtgctttccagctgcgtgatctccagctgcgtacgctccagctgcg

SEQ ID NO: 7874 - DNA, 146 bp, synthetic construct
  source 1..146: mol_type = other DNA
cgcagctgttacgctcgcagctgttgccgctcgcagctgttgctttcgcagctgttgatctcgcagctgttacgctcgcagctgttgccgctcgcagctgttgctttcgcagctgttgatctcgcagctgttacgctcgcagctgt

SEQ ID NO: 7875 - DNA, 146 bp, synthetic construct
  source 1..146: mol_type = other DNA
acagctgcgtacgctacagctgcgtgccgctacagctgcgtgctttacagctgcgtgatctacagctgcgtacgctacagctgcgtgccgctacagctgcgtgctttacagctgcgtgatctacagctgcgtacgctacagctgcg

SEQ ID NO: 7876 - DNA, 146 bp, synthetic construct
  source 1..146: mol_type = other DNA
gacagctgctacgctgacagctgctgccgctgacagctgctgctttgacagctgctgatctgacagctgctacgctgacagctgctgccgctgacagctgctgctttgacagctgctgatctgacagctgctacgctgacagctgc

SEQ ID NO: 7877 - DNA, 146 bp, synthetic construct
  source 1..146: mol_type = other DNA
gcagctgtctacgctgcagctgtctgccgctgcagctgtctgctttgcagctgtctgatctgcagctgtctacgctgcagctgtctgccgctgcagctgtctgctttgcagctgtctgatctgcagctgtctacgctgcagctgtc

SEQ ID NO: 7878 - DNA, 146 bp, synthetic construct
  source 1..146: mol_type = other DNA
gacagctggtacgctgacagctggtgccgctgacagctggtgctttgacagctggtgatctgacagctggtacgctgacagctggtgccgctgacagctggtgctttgacagctggtgatctgacagctggtacgctgacagctgg

SEQ ID NO: 7879 - DNA, 146 bp, synthetic construct
  source 1..146: mol_type = other DNA
ccagctgtctacgctccagctgtctgccgctccagctgtctgctttccagctgtctgatctccagctgtctacgctccagctgtctgccgctccagctgtctgctttccagctgtctgatctccagctgtctacgctccagctgtc

SEQ ID NO: 7880 - DNA, 146 bp, synthetic construct
  source 1..146: mol_type = other DNA
gacagctgttacgctgacagctgttgccgctgacagctgttgctttgacagctgttgatctgacagctgttacgctgacagctgttgccgctgacagctgttgctttgacagctgttgatctgacagctgttacgctgacagctgt

SEQ ID NO: 7881 - DNA, 146 bp, synthetic construct
  source 1..146: mol_type = other DNA
acagctgtctacgctacagctgtctgccgctacagctgtctgctttacagctgtctgatctacagctgtctacgctacagctgtctgccgctacagctgtctgctttacagctgtctgatctacagctgtctacgctacagctgtc

SEQ ID NO: 7882 - DNA, 146 bp, synthetic construct
  source 1..146: mol_type = other DNA
gccagctgctacgctgccagctgctgccgctgccagctgctgctttgccagctgctgatctgccagctgctacgctgccagctgctgccgctgccagctgctgctttgccagctgctgatctgccagctgctacgctgccagctgc

SEQ ID NO: 7883 - DNA, 146 bp, synthetic construct
  source 1..146: mol_type = other DNA
gcagctggctacgctgcagctggctgccgctgcagctggctgctttgcagctggctgatctgcagctggctacgctgcagctggctgccgctgcagctggctgctttgcagctggctgatctgcagctggctacgctgcagctggc

SEQ ID NO: 7884 - DNA, 146 bp, synthetic construct
  source 1..146: mol_type = other DNA
gccagctggtacgctgccagctggtgccgctgccagctggtgctttgccagctggtgatctgccagctggtacgctgccagctggtgccgctgccagctggtgctttgccagctggtgatctgccagctggtacgctgccagctgg

SEQ ID NO: 7885 - DNA, 146 bp, synthetic construct
  source 1..146: mol_type = other DNA
ccagctggctacgctccagctggctgccgctccagctggctgctttccagctggctgatctccagctggctacgctccagctggctgccgctccagctggctgctttccagctggctgatctccagctggctacgctccagctggc

SEQ ID NO: 7886 - DNA, 146 bp, synthetic construct
  source 1..146: mol_type = other DNA
gccagctgttacgctgccagctgttgccgctgccagctgttgctttgccagctgttgatctgccagctgttacgctgccagctgttgccgctgccagctgttgctttgccagctgttgatctgccagctgttacgctgccagctgt

SEQ ID NO: 7887 - DNA, 146 bp, synthetic construct
  source 1..146: mol_type = other DNA
acagctggctacgctacagctggctgccgctacagctggctgctttacagctggctgatctacagctggctacgctacagctggctgccgctacagctggctgctttacagctggctgatctacagctggctacgctacagctggc

SEQ ID NO: 7888 - DNA, 146 bp, synthetic construct
  source 1..146: mol_type = other DNA
ggcagctgctacgctggcagctgctgccgctggcagctgctgctttggcagctgctgatctggcagctgctacgctggcagctgctgccgctggcagctgctgctttggcagctgctgatctggcagctgctacgctggcagctgc

SEQ ID NO: 7889 - DNA, 146 bp, synthetic construct
  source 1..146: mol_type = other DNA
gcagctgcctacgctgcagctgcctgccgctgcagctgcctgctttgcagctgcctgatctgcagctgcctacgctgcagctgcctgccgctgcagctgcctgctttgcagctgcctgatctgcagctgcctacgctgcagctgcc

SEQ ID NO: 7890 - DNA, 146 bp, synthetic construct
  source 1..146: mol_type = other DNA
ggcagctggtacgctggcagctggtgccgctggcagctggtgctttggcagctggtgatctggcagctggtacgctggcagctggtgccgctggcagctggtgctttggcagctggtgatctggcagctggtacgctggcagctgg

SEQ ID NO: 7891 - DNA, 146 bp, synthetic construct
  source 1..146: mol_type = other DNA
ccagctgcctacgctccagctgcctgccgctccagctgcctgctttccagctgcctgatctccagctgcctacgctccagctgcctgccgctccagctgcctgctttccagctgcctgatctccagctgcctacgctccagctgcc

SEQ ID NO: 7892 - DNA, 146 bp, synthetic construct
  source 1..146: mol_type = other DNA
ggcagctgttacgctggcagctgttgccgctggcagctgttgctttggcagctgttgatctggcagctgttacgctggcagctgttgccgctggcagctgttgctttggcagctgttgatctggcagctgttacgctggcagctgt

SEQ ID NO: 7893 - DNA, 146 bp, synthetic construct
  source 1..146: mol_type = other DNA
acagctgcctacgctacagctgcctgccgctacagctgcctgctttacagctgcctgatctacagctgcctacgctacagctgcctgccgctacagctgcctgctttacagctgcctgatctacagctgcctacgctacagctgcc

SEQ ID NO: 7894 - DNA, 140 bp, synthetic construct; identical to SEQ ID NO: 7824
  source 1..140: mol_type = other DNA

SEQ ID NO: 7895 - DNA, 140 bp, synthetic construct; identical to SEQ ID NO: 7825
  source 1..140: mol_type = other DNA

SEQ ID NO: 7896 - DNA, 140 bp, synthetic construct; identical to SEQ ID NO: 7826
  source 1..140: mol_type = other DNA

SEQ ID NO: 7897 - DNA, 140 bp, synthetic construct; identical to SEQ ID NO: 7826
  source 1..140: mol_type = other DNA

SEQ ID NO: 7898 - DNA, 140 bp, synthetic construct
  source 1..140: mol_type = other DNA
taattatgcttttaattatgatcttaattatacgcttaattatgccgcttaattatgcttttaattatgatcttaattatacgcttaattatgccgcttaattatgcttttaattatgatcttaattatacgcttaatta

SEQ ID NO: 7899 - DNA, 140 bp, synthetic construct; identical to SEQ ID NO: 7898
  source 1..140: mol_type = other DNA

SEQ ID NO: 7900 - DNA, 140 bp, synthetic construct
  source 1..140: mol_type = other DNA
taattgtgcttttaattgtgatcttaattgtacgcttaattgtgccgcttaattgtgcttttaattgtgatcttaattgtacgcttaattgtgccgcttaattgtgcttttaattgtgatcttaattgtacgcttaattg

SEQ ID NO: 7901 - DNA, 140 bp, synthetic construct
  source 1..140: mol_type = other DNA
caattatgctttcaattatgatctcaattatacgctcaattatgccgctcaattatgctttcaattatgatctcaattatacgctcaattatgccgctcaattatgctttcaattatgatctcaattatacgctcaatta

SEQ ID NO: 7902 - DNA, 139 bp, synthetic construct
  source 1..139: mol_type = other DNA
cacagcagggggtgctttcacagcagggggtgatctcacagcagggggtacgctcacagcagggggtgccgctcacagcagggggtgctttcacagcagggggtgatctcacagcagggggtacgctcacagcaggggg

SEQ ID NO: 7903 - DNA, 139 bp, synthetic construct
  source 1..139: mol_type = other DNA
ccccctgctgtgtgctttccccctgctgtgtgatctccccctgctgtgtacgctccccctgctgtgtgccgctccccctgctgtgtgctttccccctgctgtgtgatctccccctgctgtgtacgctccccctgctgtg

SEQ ID NO: 7904 - DNA, 139 bp, synthetic construct
  source 1..139: mol_type = other DNA
agttgagtgactgcagtttacgctagttgagtgactgcagtttgccgctagttgagtgactgcagtttgctttagttgagtgactgcagtttgatctagttgagtgactgcagtttacgctagttgagtgactgcagtt

SEQ ID NO: 7905 - DNA, 139 bp, synthetic construct
  source 1..139: mol_type = other DNA
aactgcagtcactcaacttacgctaactgcagtcactcaacttgccgctaactgcagtcactcaacttgctttaactgcagtcactcaacttgatctaactgcagtcactcaacttacgctaactgcagtcactcaact

SEQ ID NO: 7906 - DNA, 139 bp, synthetic construct
  source 1..139: mol_type = other DNA
agttgagtgactgcggtttacgctagttgagtgactgcggtttgccgctagttgagtgactgcggtttgctttagttgagtgactgcggtttgatctagttgagtgactgcggtttacgctagttgagtgactgcggtt

SEQ ID NO: 7907 - DNA, 139 bp, synthetic construct
  source 1..139: mol_type = other DNA
aaccgcagtcactcaacttacgctaaccgcagtcactcaacttgccgctaaccgcagtcactcaacttgctttaaccgcagtcactcaacttgatctaaccgcagtcactcaacttacgctaaccgcagtcactcaact

SEQ ID NO: 7908 - DNA, 139 bp, synthetic construct
  source 1..139: mol_type = other DNA
agttgagtgactgtagtttacgctagttgagtgactgtagtttgccgctagttgagtgactgtagtttgctttagttgagtgactgtagtttgatctagttgagtgactgtagtttacgctagttgagtgactgtagtt

SEQ ID NO: 7909 - DNA, 139 bp, synthetic construct
  source 1..139: mol_type = other DNA
aactacagtcactcaacttacgctaactacagtcactcaacttgccgctaactacagtcactcaacttgctttaactacagtcactcaacttgatctaactacagtcactcaacttacgctaactacagtcactcaact

SEQ ID NO: 7910 - DNA, 139 bp, synthetic construct
  source 1..139: mol_type = other DNA
agttgagtgactgtggtttacgctagttgagtgactgtggtttgccgctagttgagtgactgtggtttgctttagttgagtgactgtggtttgatctagttgagtgactgtggtttacgctagttgagtgactgtggtt

SEQ ID NO: 7911 - DNA, 139 bp, synthetic construct
  source 1..139: mol_type = other DNA
aaccacagtcactcaacttacgctaaccacagtcactcaacttgccgctaaccacagtcactcaacttgctttaaccacagtcactcaacttgatctaaccacagtcactcaacttacgctaaccacagtcactcaact

SEQ ID NO: 7912 - DNA, 130 bp, synthetic construct
  source 1..130: mol_type = other DNA
ccccccccccacctcctcccctgccgctccccccccccacctcctcccctgctttccccccccccacctcctcccctgatctccccccccccacctcctcccctacgctccccccccccacctcctcccc

SEQ ID NO: 7913 - DNA, 130 bp, synthetic construct
  source 1..130: mol_type = other DNA
ggggaggaggtggggggggggtgccgctggggaggaggtggggggggggtgctttggggaggaggtggggggggggtgatctggggaggaggtggggggggggtacgctggggaggaggtgggggggggg

SEQ ID NO: 7914 - DNA, 130 bp, synthetic construct
  source 1..130: mol_type = other DNA
ccccccccccacctcctcccttgccgctccccccccccacctcctcccttgctttccccccccccacctcctcccttgatctccccccccccacctcctcccttacgctccccccccccacctcctccct

SEQ ID NO: 7915 - DNA, 130 bp, synthetic construct
  source 1..130: mol_type = other DNA
agggaggaggtggggggggggtgccgctagggaggaggtggggggggggtgctttagggaggaggtggggggggggtgatctagggaggaggtggggggggggtacgctagggaggaggtgggggggggg

SEQ ID NO: 7916 - DNA, 130 bp, synthetic construct
  source 1..130: mol_type = other DNA
ccccccccccacctcctcctctgccgctccccccccccacctcctcctctgctttccccccccccacctcctcctctgatctccccccccccacctcctcctctacgctccccccccccacctcctcctc

SEQ ID NO: 7917 - DNA, 130 bp, synthetic construct
  source 1..130: mol_type = other DNA
gaggaggaggtggggggggggtgccgctgaggaggaggtggggggggggtgctttgaggaggaggtggggggggggtgatctgaggaggaggtggggggggggtacgctgaggaggaggtgggggggggg

SEQ ID NO: 7918 - DNA, 130 bp, synthetic construct
  source 1..130: mol_type = other DNA
ccccccccccacctcctcctttgccgctccccccccccacctcctcctttgctttccccccccccacctcctcctttgatctccccccccccacctcctcctttacgctccccccccccacctcctcctt

SEQ ID NO: 7919 - DNA, 130 bp, synthetic construct
  source 1..130: mol_type = other DNA
aaggaggaggtggggggggggtgccgctaaggaggaggtggggggggggtgctttaaggaggaggtggggggggggtgatctaaggaggaggtggggggggggtacgctaaggaggaggtgggggggggg

SEQ ID NO: 7920 - DNA, 130 bp, synthetic construct
  source 1..130: mol_type = other DNA
ccccccctccacctcctcccctgccgctccccccctccacctcctcccctgctttccccccctccacctcctcccctgatctccccccctccacctcctcccctacgctccccccctccacctcctcccc

SEQ ID NO: 7921 - DNA, 130 bp, synthetic construct
  source 1..130: mol_type = other DNA
ggggaggaggtggagggggggtgccgctggggaggaggtggagggggggtgctttggggaggaggtggagggggggtgatctggggaggaggtggagggggggtacgctggggaggaggtggaggggggg

SEQ ID NO: 7922 - DNA, 130 bp, synthetic construct
  source 1..130: mol_type = other DNA
ccccccctccacctcctcccttgccgctccccccctccacctcctcccttgctttccccccctccacctcctcccttgatctccccccctccacctcctcccttacgctccccccctccacctcctccct

SEQ ID NO: 7923 - DNA, 130 bp, synthetic construct
  source 1..130: mol_type = other DNA
agggaggaggtggagggggggtgccgctagggaggaggtggagggggggtgctttagggaggaggtggagggggggtgatctagggaggaggtggagggggggtacgctagggaggaggtggaggggggg

SEQ ID NO: 7924 - DNA, 130 bp, synthetic construct
  source 1..130: mol_type = other DNA
ccccccctccacctcctcctctgccgctccccccctccacctcctcctctgctttccccccctccacctcctcctctgatctccccccctccacctcctcctctacgctccccccctccacctcctcctc

SEQ ID NO: 7925 - DNA, 130 bp, synthetic construct
  source 1..130: mol_type = other DNA
gaggaggaggtggagggggggtgccgctgaggaggaggtggagggggggtgctttgaggaggaggtggagggggggtgatctgaggaggaggtggagggggggtacgctgaggaggaggtggaggggggg

SEQ ID NO: 7926 - DNA, 130 bp, synthetic construct
  source 1..130: mol_type = other DNA
ccccccctccacctcctcctttgccgctccccccctccacctcctcctttgctttccccccctccacctcctcctttgatctccccccctccacctcctcctttacgctccccccctccacctcctcctt

SEQ ID NO: 7927 - DNA, 130 bp, synthetic construct
  source 1..130: mol_type = other DNA
aaggaggaggtggagggggggtgccgctaaggaggaggtggagggggggtgctttaaggaggaggtggagggggggtgatctaaggaggaggtggagggggggtacgctaaggaggaggtggaggggggg

SEQ ID NO: 7928 - DNA, 130 bp, synthetic construct
  source 1..130: mol_type = other DNA
cccctcccccacctcctcccctgccgctcccctcccccacctcctcccctgctttcccctcccccacctcctcccctgatctcccctcccccacctcctcccctacgctcccctcccccacctcctcccc

SEQ ID NO: 7929 - DNA, 130 bp, synthetic construct
  source 1..130: mol_type = other DNA
ggggaggaggtgggggaggggtgccgctggggaggaggtgggggaggggtgctttggggaggaggtgggggaggggtgatctggggaggaggtgggggaggggtacgctggggaggaggtgggggagggg

SEQ ID NO: 7930 - DNA, 130 bp, synthetic construct
  source 1..130: mol_type = other DNA
cccctcccccacctcctcccttgccgctcccctcccccacctcctcccttgctttcccctcccccacctcctcccttgatctcccctcccccacctcctcccttacgctcccctcccccacctcctccct

SEQ ID NO: 7931 - DNA, 130 bp, synthetic construct
  source 1..130: mol_type = other DNA
agggaggaggtgggggaggggtgccgctagggaggaggtgggggaggggtgctttagggaggaggtgggggaggggtgatctagggaggaggtgggggaggggtacgctagggaggaggtgggggagggg

SEQ ID NO: 7932 - DNA, 130 bp, synthetic construct
  source 1..130: mol_type = other DNA
cccctcccccacctcctcctctgccgctcccctcccccacctcctcctctgctttcccctcccccacctcctcctctgatctcccctcccccacctcctcctctacgctcccctcccccacctcctcctc

SEQ ID NO: 7933 - DNA, 130 bp, synthetic construct
  source 1..130: mol_type = other DNA
gaggaggaggtgggggaggggtgccgctgaggaggaggtgggggaggggtgctttgaggaggaggtgggggaggggtgatctgaggaggaggtgggggaggggtacgctgaggaggaggtgggggagggg

SEQ ID NO: 7934 - DNA, 130 bp, synthetic construct
  source 1..130: mol_type = other DNA
cccctcccccacctcctcctttgccgctcccctcccccacctcctcctttgctttcccctcccccacctcctcctttgatctcccctcccccacctcctcctttacgctcccctcccccacctcctcctt

SEQ ID NO: 7935 - DNA, 130 bp, synthetic construct
  source 1..130: mol_type = other DNA
aaggaggaggtgggggaggggtgccgctaaggaggaggtgggggaggggtgctttaaggaggaggtgggggaggggtgatctaaggaggaggtgggggaggggtacgctaaggaggaggtgggggagggg

SEQ ID NO: 7936 - DNA, 130 bp, synthetic construct
  source 1..130: mol_type = other DNA
cccctcctccacctcctcccctgccgctcccctcctccacctcctcccctgctttcccctcctccacctcctcccctgatctcccctcctccacctcctcccctacgctcccctcctccacctcctcccc

SEQ ID NO: 7937 - DNA, 130 bp, synthetic construct
  source 1..130: mol_type = other DNA
ggggaggaggtggaggaggggtgccgctggggaggaggtggaggaggggtgctttggggaggaggtggaggaggggtgatctggggaggaggtggaggaggggtacgctggggaggaggtggaggagggg

SEQ ID NO: 7938 - DNA, 130 bp, synthetic construct
  source 1..130: mol_type = other DNA
cccctcctccacctcctcccttgccgctcccctcctccacctcctcccttgctttcccctcctccacctcctcccttgatctcccctcctccacctcctcccttacgctcccctcctccacctcctccct

SEQ ID NO: 7939 - DNA, 130 bp, synthetic construct
  source 1..130: mol_type = other DNA
agggaggaggtggaggaggggtgccgctagggaggaggtggaggaggggtgctttagggaggaggtggaggaggggtgatctagggaggaggtggaggaggggtacgctagggaggaggtggaggagggg

SEQ ID NO: 7940 - DNA, 130 bp, synthetic construct
  source 1..130: mol_type = other DNA
cccctcctccacctcctcctctgccgctcccctcctccacctcctcctctgctttcccctcctccacctcctcctctgatctcccctcctccacctcctcctctacgctcccctcctccacctcctcctc

SEQ ID NO: 7941 - DNA, 130 bp, synthetic construct
  source 1..130: mol_type = other DNA
gaggaggaggtggaggaggggtgccgctgaggaggaggtggaggaggggtgctttgaggaggaggtggaggaggggtgatctgaggaggaggtggaggaggggtacgctgaggaggaggtggaggagggg

SEQ ID NO: 7942 - DNA, 130 bp, synthetic construct
  source 1..130: mol_type = other DNA
cccctcctccacctcctcctttgccgctcccctcctccacctcctcctttgctttcccctcctccacctcctcctttgatctcccctcctccacctcctcctttacgctcccctcctccacctcctcctt

SEQ ID NO: 7943 - DNA, 130 bp, synthetic construct
  source 1..130: mol_type = other DNA
aaggaggaggtggaggaggggtgccgctaaggaggaggtggaggaggggtgctttaaggaggaggtggaggaggggtgatctaaggaggaggtggaggaggggtacgctaaggaggaggtggaggagggg

SEQ ID NO: 7944 - DNA, 130 bp, synthetic construct
  source 1..130: mol_type = other DNA
ctccccccccacctcctcccctgccgctctccccccccacctcctcccctgctttctccccccccacctcctcccctgatctctccccccccacctcctcccctacgctctccccccccacctcctcccc

SEQ ID NO: 7945 - DNA, 130 bp, synthetic construct
  source 1..130: mol_type = other DNA
ggggaggaggtggggggggagtgccgctggggaggaggtggggggggagtgctttggggaggaggtggggggggagtgatctggggaggaggtggggggggagtacgctggggaggaggtggggggggag

SEQ ID NO: 7946 - DNA, 130 bp, synthetic construct
  source 1..130: mol_type = other DNA
ctccccccccacctcctcccttgccgctctccccccccacctcctcccttgctttctccccccccacctcctcccttgatctctccccccccacctcctcccttacgctctccccccccacctcctccct

SEQ ID NO: 7947 - DNA, 130 bp, synthetic construct
  source 1..130: mol_type = other DNA
agggaggaggtggggggggagtgccgctagggaggaggtggggggggagtgctttagggaggaggtggggggggagtgatctagggaggaggtggggggggagtacgctagggaggaggtggggggggag

SEQ ID NO: 7948 - DNA, 130 bp, synthetic construct
  source 1..130: mol_type = other DNA
ctccccccccacctcctcctctgccgctctccccccccacctcctcctctgctttctccccccccacctcctcctctgatctctccccccccacctcctcctctacgctctccccccccacctcctcctc

SEQ ID NO: 7949 - DNA, 130 bp, synthetic construct
  source 1..130: mol_type = other DNA
gaggaggaggtggggggggagtgccgctgaggaggaggtggggggggagtgctttgaggaggaggtggggggggagtgatctgaggaggaggtggggggggagtacgctgaggaggaggtggggggggag

SEQ ID NO: 7950 - DNA, 130 bp, synthetic construct
  source 1..130: mol_type = other DNA
ctccccccccacctcctcctttgccgctctccccccccacctcctcctttgctttctccccccccacctcctcctttgatctctccccccccacctcctcctttacgctctccccccccacctcctcctt

SEQ ID NO: 7951 - DNA, 130 bp, synthetic construct
  source 1..130: mol_type = other DNA
aaggaggaggtggggggggagtgccgctaaggaggaggtggggggggagtgctttaaggaggaggtggggggggagtgatctaaggaggaggtggggggggagtacgctaaggaggaggtggggggggag

SEQ ID NO: 7952 - DNA, 130 bp, synthetic construct
  source 1..130: mol_type = other DNA
ctccccctccacctcctcccctgccgctctccccctccacctcctcccctgctttctccccctccacctcctcccctgatctctccccctccacctcctcccctacgctctccccctccacctcctcccc

SEQ ID NO: 7953 - DNA, 130 bp, synthetic construct
  source 1..130: mol_type = other DNA
ggggaggaggtggagggggagtgccgctggggaggaggtggagggggagtgctttggggaggaggtggagggggagtgatctggggaggaggtggagggggagtacgctggggaggaggtggagggggag

SEQ ID NO: 7954 - DNA, 130 bp, synthetic construct
  source 1..130: mol_type = other DNA
ctccccctccacctcctcccttgccgctctccccctccacctcctcccttgctttctccccctccacctcctcccttgatctctccccctccacctcctcccttacgctctccccctccacctcctccct

SEQ ID NO: 7955 - DNA, 130 bp, synthetic construct
  source 1..130: mol_type = other DNA
agggaggaggtggagggggagtgccgctagggaggaggtggagggggagtgctttagggaggaggtggagggggagtgatctagggaggaggtggagggggagtacgctagggaggaggtggagggggag

SEQ ID NO: 7956 - DNA, 130 bp, synthetic construct
  source 1..130: mol_type = other DNA
ctccccctccacctcctcctctgccgctctccccctccacctcctcctctgctttctccccctccacctcctcctctgatctctccccctccacctcctcctctacgctctccccctccacctcctcctc

SEQ ID NO: 7957 - DNA, 130 bp, synthetic construct
  source 1..130: mol_type = other DNA
gaggaggaggtggagggggagtgccgctgaggaggaggtggagggggagtgctttgaggaggaggtggagggggagtgatctgaggaggaggtggagggggagtacgctgaggaggaggtggagggggag

SEQ ID NO: 7958 - DNA, 130 bp, synthetic construct
  source 1..130: mol_type = other DNA
ctccccctccacctcctcctttgccgctctccccctccacctcctcctttgctttctccccctccacctcctcctttgatctctccccctccacctcctcctttacgctctccccctccacctcctcctt

SEQ ID NO: 7959 - DNA, 130 bp, synthetic construct
  source 1..130: mol_type = other DNA
aaggaggaggtggagggggagtgccgctaaggaggaggtggagggggagtgctttaaggaggaggtggagggggagtgatctaaggaggaggtggagggggagtacgctaaggaggaggtggagggggag

SEQ ID NO: 7960 - DNA, 130 bp, synthetic construct
  source 1..130: mol_type = other DNA
ctcctcccccacctcctcccctgccgctctcctcccccacctcctcccctgctttctcctcccccacctcctcccctgatctctcctcccccacctcctcccctacgctctcctcccccacctcctcccc

SEQ ID NO: 7961 - DNA, 130 bp, synthetic construct
  source 1..130: mol_type = other DNA
ggggaggaggtgggggaggagtgccgctggggaggaggtgggggaggagtgctttggggaggaggtgggggaggagtgatctggggaggaggtgggggaggagtacgctggggaggaggtgggggaggag

SEQ ID NO: 7962 - DNA, 130 bp, synthetic construct
  source 1..130: mol_type = other DNA
ctcctcccccacctcctcccttgccgctctcctcccccacctcctcccttgctttctcctcccccacctcctcccttgatctctcctcccccacctcctcccttacgctctcctcccccacctcctccct

SEQ ID NO: 7963 - DNA, 130 bp, synthetic construct
  source 1..130: mol_type = other DNA
agggaggaggtgggggaggagtgccgctagggaggaggtgggggaggagtgctttagggaggaggtgggggaggagtgatctagggaggaggtgggggaggagtacgctagggaggaggtgggggaggag

SEQ ID NO: 7964 - DNA, 130 bp, synthetic construct
  source 1..130: mol_type = other DNA
ctcctcccccacctcctcctctgccgctctcctcccccacctcctcctctgctttctcctcccccacctcctcctctgatctctcctcccccacctcctcctctacgctctcctcccccacctcctcctc

SEQ ID NO: 7965 - DNA, 130 bp, synthetic construct
  source 1..130: mol_type = other DNA
gaggaggaggtgggggaggagtgccgctgaggaggaggtgggggaggagtgctttgaggaggaggtgggggaggagtgatctgaggaggaggtgggggaggagtacgctgaggaggaggtgggggaggag

SEQ ID NO: 7966 - DNA, 130 bp, synthetic construct
  source 1..130: mol_type = other DNA
ctcctcccccacctcctcctttgccgctctcctcccccacctcctcctttgctttctcctcccccacctcctcctttgatctctcctcccccacctcctcctttacgctctcctcccccacctcctcctt

SEQ ID NO: 7967 - DNA, 130 bp, synthetic construct
  source 1..130: mol_type = other DNA
aaggaggaggtgggggaggagtgccgctaaggaggaggtgggggaggagtgctttaaggaggaggtgggggaggagtgatctaaggaggaggtgggggaggagtacgctaaggaggaggtgggggaggag

SEQ ID NO: 7968 - DNA, 130 bp, synthetic construct
  source 1..130: mol_type = other DNA
ctcctcctccacctcctcccctgccgctctcctcctccacctcctcccctgctttctcctcctccacctcctcccctgatctctcctcctccacctcctcccctacgctctcctcctccacctcctcccc

SEQ ID NO: 7969 - DNA, 130 bp, synthetic construct
  source 1..130: mol_type = other DNA
ggggaggaggtggaggaggagtgccgctggggaggaggtggaggaggagtgctttggggaggaggtggaggaggagtgatctggggaggaggtggaggaggagtacgctggggaggaggtggaggaggag

SEQ ID NO: 7970 - DNA, 130 bp, synthetic construct
  source 1..130: mol_type = other DNA
ctcctcctccacctcctcccttgccgctctcctcctccacctcctcccttgctttctcctcctccacctcctcccttgatctctcctcctccacctcctcccttacgctctcctcctccacctcctccct

SEQ ID NO: 7971 - DNA, 130 bp, synthetic construct
  source 1..130: mol_type = other DNA
agggaggaggtggaggaggagtgccgctagggaggaggtggaggaggagtgctttagggaggaggtggaggaggagtgatctagggaggaggtggaggaggagtacgctagggaggaggtggaggaggag

SEQ ID NO: 7972 - DNA, 130 bp, synthetic construct
  source 1..130: mol_type = other DNA
ctcctcctccacctcctcctctgccgctctcctcctccacctcctcctctgctttctcctcctccacctcctcctctgatctctcctcctccacctcctcctctacgctctcctcctccacctcctcctc

SEQ ID NO: 7973 - DNA, 130 bp, synthetic construct
  source 1..130: mol_type = other DNA
gaggaggaggtggaggaggagtgccgctgaggaggaggtggaggaggagtgctttgaggaggaggtggaggaggagtgatctgaggaggaggtggaggaggagtacgctgaggaggaggtggaggaggag

SEQ ID NO: 7974 - DNA, 130 bp, synthetic construct
  source 1..130: mol_type = other DNA
ctcctcctccacctcctcctttgccgctctcctcctccacctcctcctttgctttctcctcctccacctcctcctttgatctctcctcctccacctcctcctttacgctctcctcctccacctcctcctt

SEQ ID NO: 7975 - DNA, 130 bp, synthetic construct
  source 1..130: mol_type = other DNA
aaggaggaggtggaggaggagtgccgctaaggaggaggtggaggaggagtgctttaaggaggaggtggaggaggagtgatctaaggaggaggtggaggaggagtacgctaaggaggaggtggaggaggag

SEQ ID NO: 7976 - DNA, 140 bp, synthetic construct
  source 1..140: mol_type = other DNA
ttatattgctttttatattgatctttatattacgctttatattgccgctttatattgctttttatattgatctttatattacgctttatattgccgctttatattgctttttatattgatctttatattacgctttatat

SEQ ID NO: 7977 - DNA, 140 bp, synthetic construct
  source 1..140: mol_type = other DNA
atataatgctttatataatgatctatataatacgctatataatgccgctatataatgctttatataatgatctatataatacgctatataatgccgctatataatgctttatataatgatctatataatacgctatataa

SEQ ID NO: 7978 - DNA, 146 bp, synthetic construct; identical to SEQ ID NO: 6666
  source 1..146: mol_type = other DNA

SEQ ID NO: 7979 - DNA, 146 bp, synthetic construct; identical to SEQ ID NO: 6667
  source 1..146: mol_type = other DNA

SEQ ID NO: 7980 - DNA, 135 bp, synthetic construct
  source 1..135: mol_type = other DNA
ccttgccccgcccctgatctccttgccccgcccctacgctccttgccccgcccctgccgctccttgccccgcccctgctttccttgccccgcccctgatctccttgccccgcccctacgctccttgccccgcccc

SEQ ID NO: 7981 - DNA, 135 bp, synthetic construct
  source 1..135: mol_type = other DNA
ggggcggggcaaggtgatctggggcggggcaaggtacgctggggcggggcaaggtgccgctggggcggggcaaggtgctttggggcggggcaaggtgatctggggcggggcaaggtacgctggggcggggcaagg

SEQ ID NO: 7982 - DNA, 140 bp, synthetic construct
  source 1..140: mol_type = other DNA
aacaactgtttgccgctaacaactgtttgctttaacaactgtttgatctaacaactgtttacgctaacaactgtttgccgctaacaactgtttgctttaacaactgtttgatctaacaactgtttacgctaacaactgtt

SEQ ID NO: 7983 - DNA, 140 bp, synthetic construct
  source 1..140: mol_type = other DNA
aacagttgtttgccgctaacagttgtttgctttaacagttgtttgatctaacagttgtttacgctaacagttgtttgccgctaacagttgtttgctttaacagttgtttgatctaacagttgtttacgctaacagttgtt

SEQ ID NO: 7984 - DNA, 140 bp, synthetic construct
  source 1..140: mol_type = other DNA
aacagctgtttgccgctaacagctgtttgctttaacagctgtttgatctaacagctgtttacgctaacagctgtttgccgctaacagctgtttgctttaacagctgtttgatctaacagctgtttacgctaacagctgtt

SEQ ID NO: 7985 - DNA, 140 bp, synthetic construct; identical to SEQ ID NO: 7984
  source 1..140: mol_type = other DNA

SEQ ID NO: 7986 - DNA, 149 bp, synthetic construct
  source 1..149: mol_type = other DNA
aaccgttattctgccgctaaccgttattctgctttaaccgttattctgatctaaccgttattctacgctaaccgttattctgccgctaaccgttattctgctttaaccgttattctgatctaaccgttattctacgctaaccgttattc

SEQ ID NO: 7987 - DNA, 149 bp, synthetic construct
  source 1..149: mol_type = other DNA
gaataacggtttgccgctgaataacggtttgctttgaataacggtttgatctgaataacggtttacgctgaataacggtttgccgctgaataacggtttgctttgaataacggtttgatctgaataacggtttacgctgaataacggtt

SEQ ID NO: 7988 - DNA, 149 bp, synthetic construct
  source 1..149: mol_type = other DNA
aaccgttattttgccgctaaccgttattttgctttaaccgttattttgatctaaccgttattttacgctaaccgttattttgccgctaaccgttattttgctttaaccgttattttgatctaaccgttattttacgctaaccgttattt

SEQ ID NO: 7989 - DNA, 149 bp, synthetic construct
  source 1..149: mol_type = other DNA
aaataacggtttgccgctaaataacggtttgctttaaataacggtttgatctaaataacggtttacgctaaataacggtttgccgctaaataacggtttgctttaaataacggtttgatctaaataacggtttacgctaaataacggtt

SEQ ID NO: 7990 - DNA, 149 bp, synthetic construct
  source 1..149: mol_type = other DNA
taccgttattctgccgcttaccgttattctgcttttaccgttattctgatcttaccgttattctacgcttaccgttattctgccgcttaccgttattctgcttttaccgttattctgatcttaccgttattctacgcttaccgttattc

SEQ ID NO: 7991 - DNA, 149 bp, synthetic construct
  source 1..149: mol_type = other DNA
gaataacggtatgccgctgaataacggtatgctttgaataacggtatgatctgaataacggtatacgctgaataacggtatgccgctgaataacggtatgctttgaataacggtatgatctgaataacggtatacgctgaataacggta

SEQ ID NO: 7992 - DNA, 149 bp, synthetic construct
  source 1..149: mol_type = other DNA
taccgttattttgccgcttaccgttattttgcttttaccgttattttgatcttaccgttattttacgcttaccgttattttgccgcttaccgttattttgcttttaccgttattttgatcttaccgttattttacgcttaccgttattt

SEQ ID NO: 7993 - DNA, 149 bp, synthetic construct
  source 1..149: mol_type = other DNA
aaataacggtatgccgctaaataacggtatgctttaaataacggtatgatctaaataacggtatacgctaaataacggtatgccgctaaataacggtatgctttaaataacggtatgatctaaataacggtatacgctaaataacggta

SEQ ID NO: 7994 - DNA, 139 bp, synthetic construct
  source 1..139: mol_type = other DNA
gtaaatattgactgctttgtaaatattgactgatctgtaaatattgactacgctgtaaatattgactgccgctgtaaatattgactgctttgtaaatattgactgatctgtaaatattgactacgctgtaaatattgac

SEQ ID NO: 7995 - DNA, 139 bp, synthetic construct
  source 1..139: mol_type = other DNA
gtcaatatttactgctttgtcaatatttactgatctgtcaatatttactacgctgtcaatatttactgccgctgtcaatatttactgctttgtcaatatttactgatctgtcaatatttactacgctgtcaatatttac

SEQ ID NO: 7996 - DNA, 139 bp, synthetic construct
  source 1..139: mol_type = other DNA
gtaaatatttactgctttgtaaatatttactgatctgtaaatatttactacgctgtaaatatttactgccgctgtaaatatttactgctttgtaaatatttactgatctgtaaatatttactacgctgtaaatatttac

SEQ ID NO: 7997 - DNA, 139 bp, synthetic construct; identical to SEQ ID NO: 7996
  source 1..139: mol_type = other DNA

SEQ ID NO: 7998 - DNA, 139 bp, synthetic construct
  source 1..139: mol_type = other DNA
gtcaatattgactgctttgtcaatattgactgatctgtcaatattgactacgctgtcaatattgactgccgctgtcaatattgactgctttgtcaatattgactgatctgtcaatattgactacgctgtcaatattgac

SEQ ID NO: 7999 - DNA, 139 bp, synthetic construct; identical to SEQ ID NO: 7998
  source 1..139: mol_type = other DNA

SEQ ID NO: 8000 - DNA, 139 bp, synthetic construct; identical to SEQ ID NO: 7995
  source 1..139: mol_type = other DNA

SEQ ID NO: 8001 - DNA, 139 bp, synthetic construct; identical to SEQ ID NO: 7994
  source 1..139: mol_type = other DNA

SEQ ID NO: 8002 - DNA, 140 bp, synthetic construct
  source 1..140: mol_type = other DNA
accatctgtttgccgctaccatctgtttgctttaccatctgtttgatctaccatctgtttacgctaccatctgtttgccgctaccatctgtttgctttaccatctgtttgatctaccatctgtttacgctaccatctgtt

SEQ ID NO: 8003 - DNA, 140 bp, synthetic construct
  source 1..140: mol_type = other DNA
aacagatggttgccgctaacagatggttgctttaacagatggttgatctaacagatggttacgctaacagatggttgccgctaacagatggttgctttaacagatggttgatctaacagatggttacgctaacagatggt

SEQ ID NO: 8004 - DNA, 139 bp, synthetic construct
  source 1..139: mol_type = other DNA
cgccccctgacatgctttcgccccctgacatgatctcgccccctgacatacgctcgccccctgacatgccgctcgccccctgacatgctttcgccccctgacatgatctcgccccctgacatacgctcgccccctgaca

SEQ ID NO: 8005 - DNA, 139 bp, synthetic construct
  source 1..139: mol_type = other DNA
tgtcagggggcgtgcttttgtcagggggcgtgatcttgtcagggggcgtacgcttgtcagggggcgtgccgcttgtcagggggcgtgcttttgtcagggggcgtgatcttgtcagggggcgtacgcttgtcagggggcg

SEQ ID NO: 8006 - DNA, 139 bp, synthetic construct
  source 1..139: mol_type = other DNA
cgccccctggcatgctttcgccccctggcatgatctcgccccctggcatacgctcgccccctggcatgccgctcgccccctggcatgctttcgccccctggcatgatctcgccccctggcatacgctcgccccctggca

SEQ ID NO: 8007 - DNA, 139 bp, synthetic construct
  source 1..139: mol_type = other DNA
tgccagggggcgtgcttttgccagggggcgtgatcttgccagggggcgtacgcttgccagggggcgtgccgcttgccagggggcgtgcttttgccagggggcgtgatcttgccagggggcgtacgcttgccagggggcg

SEQ ID NO: 8008 - DNA, 139 bp, synthetic construct
  source 1..139: mol_type = other DNA
tgccccctgacatgcttttgccccctgacatgatcttgccccctgacatacgcttgccccctgacatgccgcttgccccctgacatgcttttgccccctgacatgatcttgccccctgacatacgcttgccccctgaca

SEQ ID NO: 8009 - DNA, 139 bp, synthetic construct
  source 1..139: mol_type = other DNA
tgtcagggggcatgcttttgtcagggggcatgatcttgtcagggggcatacgcttgtcagggggcatgccgcttgtcagggggcatgcttttgtcagggggcatgatcttgtcagggggcatacgcttgtcagggggca

SEQ ID NO: 8010 - DNA, 139 bp, synthetic construct
  source 1..139: mol_type = other DNA
tgccccctggcatgcttttgccccctggcatgatcttgccccctggcatacgcttgccccctggcatgccgcttgccccctggcatgcttttgccccctggcatgatcttgccccctggcatacgcttgccccctggca

SEQ ID NO: 8011 - DNA, 139 bp, synthetic construct
  source 1..139: mol_type = other DNA
tgccagggggcatgcttttgccagggggcatgatcttgccagggggcatacgcttgccagggggcatgccgcttgccagggggcatgcttttgccagggggcatgatcttgccagggggcatacgcttgccagggggca

SEQ ID NO: 8012 - DNA, 139 bp, synthetic construct
  source 1..139: mol_type = other DNA
ttcctcctgatctttcctcctacgctttcctcctgccgctttcctcctgctttttcctcctgatctttcctcctacgctttcctcctgccgctttcctcctgctttttcctcctgatctttcctcctacgctttcctcc

SEQ ID NO: 8013 - DNA, 139 bp, synthetic construct
  source 1..139: mol_type = other DNA
ggaggaatgatctggaggaatacgctggaggaatgccgctggaggaatgctttggaggaatgatctggaggaatacgctggaggaatgccgctggaggaatgctttggaggaatgatctggaggaatacgctggaggaa

SEQ ID NO: 8014 - DNA, 139 bp, synthetic construct
  source 1..139: mol_type = other DNA
ttcctcttgatctttcctcttacgctttcctcttgccgctttcctcttgctttttcctcttgatctttcctcttacgctttcctcttgccgctttcctcttgctttttcctcttgatctttcctcttacgctttcctct

SEQ ID NO: 8015 - DNA, 139 bp, synthetic construct
  source 1..139: mol_type = other DNA
agaggaatgatctagaggaatacgctagaggaatgccgctagaggaatgctttagaggaatgatctagaggaatacgctagaggaatgccgctagaggaatgctttagaggaatgatctagaggaatacgctagaggaa

SEQ ID NO: 8016 - DNA, 150 bp, synthetic construct
  source 1..150: mol_type = other DNA
cctcatggtgccctactcccttgtgtgccgctcctcatggtgccctactcccttgtgtgctttcctcatggtgccctactcccttgtgtgatctcctcatggtgccctactcccttgtgtacgctcctcatggtgccctactcccttgtg

SEQ ID NO: 8017 - DNA, 150 bp, synthetic construct
  source 1..150: mol_type = other DNA
cacaagggagtagggcaccatgaggtgccgctcacaagggagtagggcaccatgaggtgctttcacaagggagtagggcaccatgaggtgatctcacaagggagtagggcaccatgaggtacgctcacaagggagtagggcaccatgagg

SEQ ID NO: 8018 - DNA, 150 bp, synthetic construct
  source 1..150: mol_type = other DNA
cctcatggtgccctattcccttgtgtgccgctcctcatggtgccctattcccttgtgtgctttcctcatggtgccctattcccttgtgtgatctcctcatggtgccctattcccttgtgtacgctcctcatggtgccctattcccttgtg

SEQ ID NO: 8019 - DNA, 150 bp, synthetic construct
  source 1..150: mol_type = other DNA
cacaagggaatagggcaccatgaggtgccgctcacaagggaatagggcaccatgaggtgctttcacaagggaatagggcaccatgaggtgatctcacaagggaatagggcaccatgaggtacgctcacaagggaatagggcaccatgagg

SEQ ID NO: 8020 - DNA, 150 bp, synthetic construct
  source 1..150: mol_type = other DNA
cctcatggtgcccttctcccttgtgtgccgctcctcatggtgcccttctcccttgtgtgctttcctcatggtgcccttctcccttgtgtgatctcctcatggtgcccttctcccttgtgtacgctcctcatggtgcccttctcccttgtg

SEQ ID NO: 8021 - DNA, 150 bp, synthetic construct
  source 1..150: mol_type = other DNA
cacaagggagaagggcaccatgaggtgccgctcacaagggagaagggcaccatgaggtgctttcacaagggagaagggcaccatgaggtgatctcacaagggagaagggcaccatgaggtacgctcacaagggagaagggcaccatgagg

SEQ ID NO: 8022 - DNA, 150 bp, synthetic construct
  source 1..150: mol_type = other DNA
cctcatggtgcccttttcccttgtgtgccgctcctcatggtgcccttttcccttgtgtgctttcctcatggtgcccttttcccttgtgtgatctcctcatggtgcccttttcccttgtgtacgctcctcatggtgcccttttcccttgtg

SEQ ID NO: 8023 - DNA, 150 bp, synthetic construct
  source 1..150: mol_type = other DNA
cacaagggaaaagggcaccatgaggtgccgctcacaagggaaaagggcaccatgaggtgctttcacaagggaaaagggcaccatgaggtgatctcacaagggaaaagggcaccatgaggtacgctcacaagggaaaagggcaccatgagg

SEQ ID NO: 8024 - DNA, 150 bp, synthetic construct
  source 1..150: mol_type = other DNA
cctcatggtgccttactcccttgtgtgccgctcctcatggtgccttactcccttgtgtgctttcctcatggtgccttactcccttgtgtgatctcctcatggtgccttactcccttgtgtacgctcctcatggtgccttactcccttgtg

SEQ ID NO: 8025 - DNA, 150 bp, synthetic construct
  source 1..150: mol_type = other DNA
cacaagggagtaaggcaccatgaggtgccgctcacaagggagtaaggcaccatgaggtgctttcacaagggagtaaggcaccatgaggtgatctcacaagggagtaaggcaccatgaggtacgctcacaagggagtaaggcaccatgagg

SEQ ID NO: 8026 - DNA, 150 bp, synthetic construct
  source 1..150: mol_type = other DNA
cctcatggtgccttattcccttgtgtgccgctcctcatggtgccttattcccttgtgtgctttcctcatggtgccttattcccttgtgtgatctcctcatggtgccttattcccttgtgtacgctcctcatggtgccttattcccttgtg

SEQ ID NO: 8027 - DNA, 150 bp, synthetic construct
  source 1..150: mol_type = other DNA
cacaagggaataaggcaccatgaggtgccgctcacaagggaataaggcaccatgaggtgctttcacaagggaataaggcaccatgaggtgatctcacaagggaataaggcaccatgaggtacgctcacaagggaataaggcaccatgagg

SEQ ID NO: 8028 - DNA, 150 bp, synthetic construct
  source 1..150: mol_type = other DNA
cctcatggtgcctttctcccttgtgtgccgctcctcatggtgcctttctcccttgtgtgctttcctcatggtgcctttctcccttgtgtgatctcctcatggtgcctttctcccttgtgtacgctcctcatggtgcctttctcccttgtg

SEQ ID NO: 8029 - DNA, 150 bp, synthetic construct
  source 1..150: mol_type = other DNA
cacaagggagaaaggcaccatgaggtgccgctcacaagggagaaaggcaccatgaggtgctttcacaagggagaaaggcaccatgaggtgatctcacaagggagaaaggcaccatgaggtacgctcacaagggagaaaggcaccatgagg

SEQ ID NO: 8030 - DNA, 150 bp, synthetic construct
  source 1..150: mol_type = other DNA
cctcatggtgcctttttcccttgtgtgccgctcctcatggtgcctttttcccttgtgtgctttcctcatggtgcctttttcccttgtgtgatctcctcatggtgcctttttcccttgtgtacgctcctcatggtgcctttttcccttgtg

SEQ ID NO: 8031 - DNA, 150 bp, synthetic construct
  source 1..150: mol_type = other DNA
cacaagggaaaaaggcaccatgaggtgccgctcacaagggaaaaaggcaccatgaggtgctttcacaagggaaaaaggcaccatgaggtgatctcacaagggaaaaaggcaccatgaggtacgctcacaagggaaaaaggcaccatgagg

SEQ ID NO: 8032 - DNA, 150 bp, synthetic construct
  source 1..150: mol_type = other DNA
cctcatggtgtcctactcccttgtgtgccgctcctcatggtgtcctactcccttgtgtgctttcctcatggtgtcctactcccttgtgtgatctcctcatggtgtcctactcccttgtgtacgctcctcatggtgtcctactcccttgtg

SEQ ID NO: 8033 - DNA, 150 bp, synthetic construct
  source 1..150: mol_type = other DNA
cacaagggagtaggacaccatgaggtgccgctcacaagggagtaggacaccatgaggtgctttcacaagggagtaggacaccatgaggtgatctcacaagggagtaggacaccatgaggtacgctcacaagggagtaggacaccatgagg

SEQ ID NO: 8034 - DNA, 150 bp, synthetic construct
  source 1..150: mol_type = other DNA
cctcatggtgtcctattcccttgtgtgccgctcctcatggtgtcctattcccttgtgtgctttcctcatggtgtcctattcccttgtgtgatctcctcatggtgtcctattcccttgtgtacgctcctcatggtgtcctattcccttgtg

SEQ ID NO: 8035 - DNA, 150 bp, synthetic construct
  source 1..150: mol_type = other DNA
cacaagggaataggacaccatgaggtgccgctcacaagggaataggacaccatgaggtgctttcacaagggaataggacaccatgaggtgatctcacaagggaataggacaccatgaggtacgctcacaagggaataggacaccatgagg

SEQ ID NO: 8036 - DNA, 150 bp, synthetic construct
  source 1..150: mol_type = other DNA
cctcatggtgtccttctcccttgtgtgccgctcctcatggtgtccttctcccttgtgtgctttcctcatggtgtccttctcccttgtgtgatctcctcatggtgtccttctcccttgtgtacgctcctcatggtgtccttctcccttgtg

SEQ ID NO: 8037 - DNA, 150 bp, synthetic construct
  source 1..150: mol_type = other DNA
cacaagggagaaggacaccatgaggtgccgctcacaagggagaaggacaccatgaggtgctttcacaagggagaaggacaccatgaggtgatctcacaagggagaaggacaccatgaggtacgctcacaagggagaaggacaccatgagg

SEQ ID NO: 8038 - DNA, 150 bp, synthetic construct
  source 1..150: mol_type = other DNA
cctcatggtgtccttttcccttgtgtgccgctcctcatggtgtccttttcccttgtgtgctttcctcatggtgtccttttcccttgtgtgatctcctcatggtgtccttttcccttgtgtacgctcctcatggtgtccttttcccttgtg

SEQ ID NO: 8039 - DNA, 150 bp, synthetic construct
  source 1..150: mol_type = other DNA
cacaagggaaaaggacaccatgaggtgccgctcacaagggaaaaggacaccatgaggtgctttcacaagggaaaaggacaccatgaggtgatctcacaagggaaaaggacaccatgaggtacgctcacaagggaaaaggacaccatgagg

SEQ ID NO: 8040 - DNA, 150 bp, synthetic construct
  source 1..150: mol_type = other DNA
cctcatggtgtcttactcccttgtgtgccgctcctcatggtgtcttactcccttgtgtgctttcctcatggtgtcttactcccttgtgtgatctcctcatggtgtcttactcccttgtgtacgctcctcatggtgtcttactcccttgtg

SEQ ID NO: 8041 - DNA, 150 bp, synthetic construct
  source 1..150: mol_type = other DNA
cacaagggagtaagacaccatgaggtgccgctcacaagggagtaagacaccatgaggtgctttcacaagggagtaagacaccatgaggtgatctcacaagggagtaagacaccatgaggtacgctcacaagggagtaagacaccatgagg

SEQ ID NO: 8042 - DNA, 150 bp, synthetic construct
  source 1..150: mol_type = other DNA
cctcatggtgtcttattcccttgtgtgccgctcctcatggtgtcttattcccttgtgtgctttcctcatggtgtcttattcccttgtgtgatctcctcatggtgtcttattcccttgtgtacgctcctcatggtgtcttattcccttgtg

SEQ ID NO: 8043 - DNA, 150 bp, synthetic construct
  source 1..150: mol_type = other DNA
cacaagggaataagacaccatgaggtgccgctcacaagggaataagacaccatgaggtgctttcacaagggaataagacaccatgaggtgatctcacaagggaataagacaccatgaggtacgctcacaagggaataagacaccatgagg

SEQ ID NO: 8044 - DNA, 150 bp, synthetic construct
  source 1..150: mol_type = other DNA
cctcatggtgtctttctcccttgtgtgccgctcctcatggtgtctttctcccttgtgtgctttcctcatggtgtctttctcccttgtgtgatctcctcatggtgtctttctcccttgtgtacgctcctcatggtgtctttctcccttgtg

SEQ ID NO: 8045 - DNA, 150 bp, synthetic construct
  source 1..150: mol_type = other DNA
cacaagggagaaagacaccatgaggtgccgctcacaagggagaaagacaccatgaggtgctttcacaagggagaaagacaccatgaggtgatctcacaagggagaaagacaccatgaggtacgctcacaagggagaaagacaccatgagg

SEQ ID NO: 8046 - DNA, 150 bp, synthetic construct
  source 1..150: mol_type = other DNA
cctcatggtgtctttttcccttgtgtgccgctcctcatggtgtctttttcccttgtgtgctttcctcatggtgtctttttcccttgtgtgatctcctcatggtgtctttttcccttgtgtacgctcctcatggtgtctttttcccttgtg

SEQ ID NO: 8047 - DNA, 150 bp, synthetic construct
  source 1..150: mol_type = other DNA
cacaagggaaaaagacaccatgaggtgccgctcacaagggaaaaagacaccatgaggtgctttcacaagggaaaaagacaccatgaggtgatctcacaagggaaaaagacaccatgaggtacgctcacaagggaaaaagacaccatgagg

SEQ ID NO: 8048 - DNA, 133 bp, synthetic construct
  source 1..133: mol_type = other DNA
tcctacccggcaactgctacgcttcctacccggcaactgctgccgcttcctacccggcaactgctgcttttcctacccggcaactgctgatcttcctacccggcaactgctacgcttcctacccggcaactgc

SEQ ID NO: 8049 - DNA, 133 bp, synthetic construct
  source 1..133: mol_type = other DNA
gcagttgccgggtaggatacgctgcagttgccgggtaggatgccgctgcagttgccgggtaggatgctttgcagttgccgggtaggatgatctgcagttgccgggtaggatacgctgcagttgccgggtagga

SEQ ID NO: 8050 - DNA, 133 bp, synthetic construct
  source 1..133: mol_type = other DNA
tcctacccggcaactgttacgcttcctacccggcaactgttgccgcttcctacccggcaactgttgcttttcctacccggcaactgttgatcttcctacccggcaactgttacgcttcctacccggcaactgt

SEQ ID NO: 8051 - DNA, 133 bp, synthetic construct
  source 1..133: mol_type = other DNA
acagttgccgggtaggatacgctacagttgccgggtaggatgccgctacagttgccgggtaggatgctttacagttgccgggtaggatgatctacagttgccgggtaggatacgctacagttgccgggtagga

SEQ ID NO: 8052 - DNA, 133 bp, synthetic construct
  source 1..133: mol_type = other DNA
tcctacccggcagctgctacgcttcctacccggcagctgctgccgcttcctacccggcagctgctgcttttcctacccggcagctgctgatcttcctacccggcagctgctacgcttcctacccggcagctgc

SEQ ID NO: 8053 - DNA, 133 bp, synthetic construct
  source 1..133: mol_type = other DNA
gcagctgccgggtaggatacgctgcagctgccgggtaggatgccgctgcagctgccgggtaggatgctttgcagctgccgggtaggatgatctgcagctgccgggtaggatacgctgcagctgccgggtagga

SEQ ID NO: 8054 - DNA, 133 bp, synthetic construct
  source 1..133: mol_type = other DNA
tcctacccggcagctgttacgcttcctacccggcagctgttgccgcttcctacccggcagctgttgcttttcctacccggcagctgttgatcttcctacccggcagctgttacgcttcctacccggcagctgt

SEQ ID NO: 8055 - DNA, 133 bp, synthetic construct
  source 1..133: mol_type = other DNA
acagctgccgggtaggatacgctacagctgccgggtaggatgccgctacagctgccgggtaggatgctttacagctgccgggtaggatgatctacagctgccgggtaggatacgctacagctgccgggtagga

SEQ ID NO: 8056 - DNA, 135 bp, synthetic construct
  source 1..135: mol_type = other DNA
cagataacatctaatgatctcagataacatctaatacgctcagataacatctaatgccgctcagataacatctaatgctttcagataacatctaatgatctcagataacatctaatacgctcagataacatctaa

SEQ ID NO: 8057 - DNA, 135 bp, synthetic construct
  source 1..135: mol_type = other DNA
ttagatgttatctgtgatctttagatgttatctgtacgctttagatgttatctgtgccgctttagatgttatctgtgctttttagatgttatctgtgatctttagatgttatctgtacgctttagatgttatctg

SEQ ID NO: 8058 - DNA, 135 bp, synthetic construct
  source 1..135: mol_type = other DNA
cagataacatctactgatctcagataacatctactacgctcagataacatctactgccgctcagataacatctactgctttcagataacatctactgatctcagataacatctactacgctcagataacatctac

SEQ ID NO: 8059 - DNA, 135 bp, synthetic construct
  source 1..135: mol_type = other DNA
gtagatgttatctgtgatctgtagatgttatctgtacgctgtagatgttatctgtgccgctgtagatgttatctgtgctttgtagatgttatctgtgatctgtagatgttatctgtacgctgtagatgttatctg

SEQ ID NO: 8060 - DNA, 135 bp, synthetic construct
  source 1..135: mol_type = other DNA
cagataacatctattgatctcagataacatctattacgctcagataacatctattgccgctcagataacatctattgctttcagataacatctattgatctcagataacatctattacgctcagataacatctat

SEQ ID NO: 8061 - DNA, 135 bp, synthetic construct
  source 1..135: mol_type = other DNA
atagatgttatctgtgatctatagatgttatctgtacgctatagatgttatctgtgccgctatagatgttatctgtgctttatagatgttatctgtgatctatagatgttatctgtacgctatagatgttatctg

SEQ ID NO: 8062 - DNA, 135 bp, synthetic construct
  source 1..135: mol_type = other DNA
cagataacatctcatgatctcagataacatctcatacgctcagataacatctcatgccgctcagataacatctcatgctttcagataacatctcatgatctcagataacatctcatacgctcagataacatctca

SEQ ID NO: 8063 - DNA, 135 bp, synthetic construct
  source 1..135: mol_type = other DNA
tgagatgttatctgtgatcttgagatgttatctgtacgcttgagatgttatctgtgccgcttgagatgttatctgtgcttttgagatgttatctgtgatcttgagatgttatctgtacgcttgagatgttatctg

SEQ ID NO: 8064 - DNA, 135 bp, synthetic construct
  source 1..135: mol_type = other DNA
cagataacatctcctgatctcagataacatctcctacgctcagataacatctcctgccgctcagataacatctcctgctttcagataacatctcctgatctcagataacatctcctacgctcagataacatctcc

SEQ ID NO: 8065 - DNA, 135 bp, synthetic construct
  source 1..135: mol_type = other DNA
ggagatgttatctgtgatctggagatgttatctgtacgctggagatgttatctgtgccgctggagatgttatctgtgctttggagatgttatctgtgatctggagatgttatctgtacgctggagatgttatctg

SEQ ID NO: 8066 - DNA, 135 bp, synthetic construct
  source 1..135: mol_type = other DNA
cagataacatctcttgatctcagataacatctcttacgctcagataacatctcttgccgctcagataacatctcttgctttcagataacatctcttgatctcagataacatctcttacgctcagataacatctct

SEQ ID NO: 8067 - DNA, 135 bp, synthetic construct
  source 1..135: mol_type = other DNA
agagatgttatctgtgatctagagatgttatctgtacgctagagatgttatctgtgccgctagagatgttatctgtgctttagagatgttatctgtgatctagagatgttatctgtacgctagagatgttatctg

SEQ ID NO: 8068 - DNA, 135 bp, synthetic construct
  source 1..135: mol_type = other DNA
cagataacatctgatgatctcagataacatctgatacgctcagataacatctgatgccgctcagataacatctgatgctttcagataacatctgatgatctcagataacatctgatacgctcagataacatctga

SEQ ID NO: 8069 - DNA, 135 bp, synthetic construct
  source 1..135: mol_type = other DNA
tcagatgttatctgtgatcttcagatgttatctgtacgcttcagatgttatctgtgccgcttcagatgttatctgtgcttttcagatgttatctgtgatcttcagatgttatctgtacgcttcagatgttatctg

SEQ ID NO: 8070 - DNA, 135 bp, synthetic construct
  source 1..135: mol_type = other DNA
cagataacatctgctgatctcagataacatctgctacgctcagataacatctgctgccgctcagataacatctgctgctttcagataacatctgctgatctcagataacatctgctacgctcagataacatctgc

SEQ ID NO: 8071 - DNA, 135 bp, synthetic construct
  source 1..135: mol_type = other DNA
gcagatgttatctgtgatctgcagatgttatctgtacgctgcagatgttatctgtgccgctgcagatgttatctgtgctttgcagatgttatctgtgatctgcagatgttatctgtacgctgcagatgttatctg

SEQ ID NO: 8072 - DNA, 135 bp, synthetic construct
  source 1..135: mol_type = other DNA
cagataacatctgttgatctcagataacatctgttacgctcagataacatctgttgccgctcagataacatctgttgctttcagataacatctgttgatctcagataacatctgttacgctcagataacatctgt

SEQ ID NO: 8073 - DNA, 135 bp, synthetic construct
  source 1..135: mol_type = other DNA
acagatgttatctgtgatctacagatgttatctgtacgctacagatgttatctgtgccgctacagatgttatctgtgctttacagatgttatctgtgatctacagatgttatctgtacgctacagatgttatctg

SEQ ID NO: 8074 - DNA, 135 bp, synthetic construct
  source 1..135: mol_type = other DNA
cagataatatctaatgatctcagataatatctaatacgctcagataatatctaatgccgctcagataatatctaatgctttcagataatatctaatgatctcagataatatctaatacgctcagataatatctaa

SEQ ID NO: 8075 - DNA, 135 bp, synthetic construct
  source 1..135: mol_type = other DNA
ttagatattatctgtgatctttagatattatctgtacgctttagatattatctgtgccgctttagatattatctgtgctttttagatattatctgtgatctttagatattatctgtacgctttagatattatctg

SEQ ID NO: 8076 - DNA, 135 bp, synthetic construct
  source 1..135: mol_type = other DNA
cagataatatctactgatctcagataatatctactacgctcagataatatctactgccgctcagataatatctactgctttcagataatatctactgatctcagataatatctactacgctcagataatatctac

SEQ ID NO: 8077 - DNA, 135 bp, synthetic construct
  source 1..135: mol_type = other DNA
gtagatattatctgtgatctgtagatattatctgtacgctgtagatattatctgtgccgctgtagatattatctgtgctttgtagatattatctgtgatctgtagatattatctgtacgctgtagatattatctg

SEQ ID NO: 8078 - DNA, 135 bp, synthetic construct
  source 1..135: mol_type = other DNA
cagataatatctattgatctcagataatatctattacgctcagataatatctattgccgctcagataatatctattgctttcagataatatctattgatctcagataatatctattacgctcagataatatctat

SEQ ID NO: 8079 - DNA, 135 bp, synthetic construct
  source 1..135: mol_type = other DNA
atagatattatctgtgatctatagatattatctgtacgctatagatattatctgtgccgctatagatattatctgtgctttatagatattatctgtgatctatagatattatctgtacgctatagatattatctg

SEQ ID NO: 8080 - DNA, 135 bp, synthetic construct
  source 1..135: mol_type = other DNA
cagataatatctcatgatctcagataatatctcatacgctcagataatatctcatgccgctcagataatatctcatgctttcagataatatctcatgatctcagataatatctcatacgctcagataatatctca

SEQ ID NO: 8081 - DNA, 135 bp, synthetic construct
  source 1..135: mol_type = other DNA
tgagatattatctgtgatcttgagatattatctgtacgcttgagatattatctgtgccgcttgagatattatctgtgcttttgagatattatctgtgatcttgagatattatctgtacgcttgagatattatctg

SEQ ID NO: 8082 - DNA, 135 bp, synthetic construct
  source 1..135: mol_type = other DNA
cagataatatctcctgatctcagataatatctcctacgctcagataatatctcctgccgctcagataatatctcctgctttcagataatatctcctgatctcagataatatctcctacgctcagataatatctcc

SEQ ID NO: 8083 - DNA, 135 bp, synthetic construct
  source 1..135: mol_type = other DNA
ggagatattatctgtgatctggagatattatctgtacgctggagatattatctgtgccgctggagatattatctgtgctttggagatattatctgtgatctggagatattatctgtacgctggagatattatctg

SEQ ID NO: 8084 - DNA, 135 bp, synthetic construct
  source 1..135: mol_type = other DNA
cagataatatctcttgatctcagataatatctcttacgctcagataatatctcttgccgctcagataatatctcttgctttcagataatatctcttgatctcagataatatctcttacgctcagataatatctct

SEQ ID NO: 8085 - DNA, 135 bp, synthetic construct
  source 1..135: mol_type = other DNA
agagatattatctgtgatctagagatattatctgtacgctagagatattatctgtgccgctagagatattatctgtgctttagagatattatctgtgatctagagatattatctgtacgctagagatattatctg

SEQ ID NO: 8086 - DNA, 135 bp, synthetic construct
  source 1..135: mol_type = other DNA
cagataatatctgatgatctcagataatatctgatacgctcagataatatctgatgccgctcagataatatctgatgctttcagataatatctgatgatctcagataatatctgatacgctcagataatatctga

SEQ ID NO: 8087 - DNA, 135 bp, synthetic construct
  source 1..135: mol_type = other DNA
tcagatattatctgtgatcttcagatattatctgtacgcttcagatattatctgtgccgcttcagatattatctgtgcttttcagatattatctgtgatcttcagatattatctgtacgcttcagatattatctg

SEQ ID NO: 8088 - DNA, 135 bp, synthetic construct
  source 1..135: mol_type = other DNA
cagataatatctgctgatctcagataatatctgctacgctcagataatatctgctgccgctcagataatatctgctgctttcagataatatctgctgatctcagataatatctgctacgctcagataatatctgc

SEQ ID NO: 8089 - DNA, 135 bp, synthetic construct
  source 1..135: mol_type = other DNA
gcagatattatctgtgatctgcagatattatctgtacgctgcagatattatctgtgccgctgcagatattatctgtgctttgcagatattatctgtgatctgcagatattatctgtacgctgcagatattatctg

SEQ ID NO: 8090 - DNA, 135 bp, synthetic construct
  source 1..135: mol_type = other DNA
cagataatatctgttgatctcagataatatctgttacgctcagataatatctgttgccgctcagataatatctgttgctttcagataatatctgttgatctcagataatatctgttacgctcagataatatctgt

SEQ ID NO: 8091 - DNA, 135 bp, synthetic construct
  source 1..135: mol_type = other DNA
acagatattatctgtgatctacagatattatctgtacgctacagatattatctgtgccgctacagatattatctgtgctttacagatattatctgtgatctacagatattatctgtacgctacagatattatctg

SEQ ID NO: 8092 - DNA, 135 bp, synthetic construct
  source 1..135: mol_type = other DNA
cagatatcatctaatgatctcagatatcatctaatacgctcagatatcatctaatgccgctcagatatcatctaatgctttcagatatcatctaatgatctcagatatcatctaatacgctcagatatcatctaa

SEQ ID NO: 8093 - DNA, 135 bp, synthetic construct
  source 1..135: mol_type = other DNA
ttagatgatatctgtgatctttagatgatatctgtacgctttagatgatatctgtgccgctttagatgatatctgtgctttttagatgatatctgtgatctttagatgatatctgtacgctttagatgatatctg

SEQ ID NO: 8094 - DNA, 135 bp, synthetic construct
  source 1..135: mol_type = other DNA
cagatatcatctactgatctcagatatcatctactacgctcagatatcatctactgccgctcagatatcatctactgctttcagatatcatctactgatctcagatatcatctactacgctcagatatcatctac

SEQ ID NO: 8095 - DNA, 135 bp, synthetic construct
  source 1..135: mol_type = other DNA
gtagatgatatctgtgatctgtagatgatatctgtacgctgtagatgatatctgtgccgctgtagatgatatctgtgctttgtagatgatatctgtgatctgtagatgatatctgtacgctgtagatgatatctg

SEQ ID NO: 8096 - DNA, 135 bp, synthetic construct
  source 1..135: mol_type = other DNA
cagatatcatctattgatctcagatatcatctattacgctcagatatcatctattgccgctcagatatcatctattgctttcagatatcatctattgatctcagatatcatctattacgctcagatatcatctat

SEQ ID NO: 8097 - DNA, 135 bp, synthetic construct
  source 1..135: mol_type = other DNA
atagatgatatctgtgatctatagatgatatctgtacgctatagatgatatctgtgccgctatagatgatatctgtgctttatagatgatatctgtgatctatagatgatatctgtacgctatagatgatatctg

SEQ ID NO: 8098 - DNA, 135 bp, synthetic construct
  source 1..135: mol_type = other DNA
cagatatcatctcatgatctcagatatcatctcatacgctcagatatcatctcatgccgctcagatatcatctcatgctttcagatatcatctcatgatctcagatatcatctcatacgctcagatatcatctca

SEQ ID NO: 8099 - DNA, 135 bp, synthetic construct
  source 1..135: mol_type = other DNA
tgagatgatatctgtgatcttgagatgatatctgtacgcttgagatgatatctgtgccgcttgagatgatatctgtgcttttgagatgatatctgtgatcttgagatgatatctgtacgcttgagatgatatctg

SEQ ID NO: 8100 - DNA, 135 bp, synthetic construct
  source 1..135: mol_type = other DNA
cagatatcatctcctgatctcagatatcatctcctacgctcagatatcatctcctgccgctcagatatcatctcctgctttcagatatcatctcctgatctcagatatcatctcctacgctcagatatcatctcc

SEQ ID NO: 8101 - DNA, 135 bp, synthetic construct
  source 1..135: mol_type = other DNA
ggagatgatatctgtgatctggagatgatatctgtacgctggagatgatatctgtgccgctggagatgatatctgtgctttggagatgatatctgtgatctggagatgatatctgtacgctggagatgatatctg

SEQ ID NO: 8102 - DNA, 135 bp, synthetic construct
  source 1..135: mol_type = other DNA
cagatatcatctcttgatctcagatatcatctcttacgctcagatatcatctcttgccgctcagatatcatctcttgctttcagatatcatctcttgatctcagatatcatctcttacgctcagatatcatctct

SEQ ID NO: 8103 - DNA, 135 bp, synthetic construct
  source 1..135: mol_type = other DNA
agagatgatatctgtgatctagagatgatatctgtacgctagagatgatatctgtgccgctagagatgatatctgtgctttagagatgatatctgtgatctagagatgatatctgtacgctagagatgatatctg

SEQ ID NO: 8104 - DNA, 135 bp, synthetic construct
  source 1..135: mol_type = other DNA
cagatatcatctgatgatctcagatatcatctgatacgctcagatatcatctgatgccgctcagatatcatctgatgctttcagatatcatctgatgatctcagatatcatctgatacgctcagatatcatctga

SEQ ID NO: 8105 - DNA, 135 bp, synthetic construct
  source 1..135: mol_type = other DNA
tcagatgatatctgtgatcttcagatgatatctgtacgcttcagatgatatctgtgccgcttcagatgatatctgtgcttttcagatgatatctgtgatcttcagatgatatctgtacgcttcagatgatatctg

SEQ ID NO: 8106 - DNA, 135 bp, synthetic construct
  source 1..135: mol_type = other DNA
cagatatcatctgctgatctcagatatcatctgctacgctcagatatcatctgctgccgctcagatatcatctgctgctttcagatatcatctgctgatctcagatatcatctgctacgctcagatatcatctgc

SEQ ID NO: 8107 - DNA, 135 bp, synthetic construct
  source 1..135: mol_type = other DNA
gcagatgatatctgtgatctgcagatgatatctgtacgctgcagatgatatctgtgccgctgcagatgatatctgtgctttgcagatgatatctgtgatctgcagatgatatctgtacgctgcagatgatatctg

SEQ ID NO: 8108 - DNA, 135 bp, synthetic construct
  source 1..135: mol_type = other DNA
cagatatcatctgttgatctcagatatcatctgttacgctcagatatcatctgttgccgctcagatatcatctgttgctttcagatatcatctgttgatctcagatatcatctgttacgctcagatatcatctgt

SEQ ID NO: 8109 - DNA, 135 bp, synthetic construct
  source 1..135: mol_type = other DNA
acagatgatatctgtgatctacagatgatatctgtacgctacagatgatatctgtgccgctacagatgatatctgtgctttacagatgatatctgtgatctacagatgatatctgtacgctacagatgatatctg

SEQ ID NO: 8110 - DNA, 135 bp, synthetic construct
  source 1..135: mol_type = other DNA
cagatattatctaatgatctcagatattatctaatacgctcagatattatctaatgccgctcagatattatctaatgctttcagatattatctaatgatctcagatattatctaatacgctcagatattatctaa

SEQ ID NO: 8111 - DNA, 135 bp, synthetic construct
  source 1..135: mol_type = other DNA
ttagataatatctgtgatctttagataatatctgtacgctttagataatatctgtgccgctttagataatatctgtgctttttagataatatctgtgatctttagataatatctgtacgctttagataatatctg

SEQ ID NO: 8112 - DNA, 135 bp, synthetic construct
  source 1..135: mol_type = other DNA
cagatattatctactgatctcagatattatctactacgctcagatattatctactgccgctcagatattatctactgctttcagatattatctactgatctcagatattatctactacgctcagatattatctac

SEQ ID NO: 8113 - DNA, 135 bp, synthetic construct
  source 1..135: mol_type = other DNA
gtagataatatctgtgatctgtagataatatctgtacgctgtagataatatctgtgccgctgtagataatatctgtgctttgtagataatatctgtgatctgtagataatatctgtacgctgtagataatatctg

SEQ ID NO: 8114 - DNA, 135 bp, synthetic construct
  source 1..135: mol_type = other DNA
cagatattatctattgatctcagatattatctattacgctcagatattatctattgccgctcagatattatctattgctttcagatattatctattgatctcagatattatctattacgctcagatattatctat

SEQ ID NO: 8115 - DNA, 135 bp, synthetic construct
  source 1..135: mol_type = other DNA
atagataatatctgtgatctatagataatatctgtacgctatagataatatctgtgccgctatagataatatctgtgctttatagataatatctgtgatctatagataatatctgtacgctatagataatatctg

SEQ ID NO: 8116 - DNA, 135 bp, synthetic construct
  source 1..135: mol_type = other DNA
cagatattatctcatgatctcagatattatctcatacgctcagatattatctcatgccgctcagatattatctcatgctttcagatattatctcatgatctcagatattatctcatacgctcagatattatctca

SEQ ID NO: 8117 - DNA, 135 bp, synthetic construct
  source 1..135: mol_type = other DNA
tgagataatatctgtgatcttgagataatatctgtacgcttgagataatatctgtgccgcttgagataatatctgtgcttttgagataatatctgtgatcttgagataatatctgtacgcttgagataatatctg

SEQ ID NO: 8118 - DNA, 135 bp, synthetic construct
  source 1..135: mol_type = other DNA
cagatattatctcctgatctcagatattatctcctacgctcagatattatctcctgccgctcagatattatctcctgctttcagatattatctcctgatctcagatattatctcctacgctcagatattatctcc

SEQ ID NO: 8119 - DNA, 135 bp, synthetic construct
  source 1..135: mol_type = other DNA
ggagataatatctgtgatctggagataatatctgtacgctggagataatatctgtgccgctggagataatatctgtgctttggagataatatctgtgatctggagataatatctgtacgctggagataatatctg

SEQ ID NO: 8120 - DNA, 135 bp, synthetic construct
  source 1..135: mol_type = other DNA
cagatattatctcttgatctcagatattatctcttacgctcagatattatctcttgccgctcagatattatctcttgctttcagatattatctcttgatctcagatattatctcttacgctcagatattatctct

SEQ ID NO: 8121 - DNA, 135 bp, synthetic construct
  source 1..135: mol_type = other DNA
agagataatatctgtgatctagagataatatctgtacgctagagataatatctgtgccgctagagataatatctgtgctttagagataatatctgtgatctagagataatatctgtacgctagagataatatctg

SEQ ID NO: 8122 - DNA, 135 bp, synthetic construct
  source 1..135: mol_type = other DNA
cagatattatctgatgatctcagatattatctgatacgctcagatattatctgatgccgctcagatattatctgatgctttcagatattatctgatgatctcagatattatctgatacgctcagatattatctga

SEQ ID NO: 8123 - DNA, 135 bp, synthetic construct
  source 1..135: mol_type = other DNA
tcagataatatctgtgatcttcagataatatctgtacgcttcagataatatctgtgccgcttcagataatatctgtgcttttcagataatatctgtgatcttcagataatatctgtacgcttcagataatatctg

SEQ ID NO: 8124 - DNA, 135 bp, synthetic construct
  source 1..135: mol_type = other DNA
cagatattatctgctgatctcagatattatctgctacgctcagatattatctgctgccgctcagatattatctgctgctttcagatattatctgctgatctcagatattatctgctacgctcagatattatctgc

SEQ ID NO: 8125 - DNA, 135 bp, synthetic construct
  source 1..135: mol_type = other DNA
gcagataatatctgtgatctgcagataatatctgtacgctgcagataatatctgtgccgctgcagataatatctgtgctttgcagataatatctgtgatctgcagataatatctgtacgctgcagataatatctg

SEQ ID NO: 8126 - DNA, 135 bp, synthetic construct
  source 1..135: mol_type = other DNA
cagatattatctgttgatctcagatattatctgttacgctcagatattatctgttgccgctcagatattatctgttgctttcagatattatctgttgatctcagatattatctgttacgctcagatattatctgt

SEQ ID NO: 8127 - DNA, 135 bp, synthetic construct
  source 1..135: mol_type = other DNA
acagataatatctgtgatctacagataatatctgtacgctacagataatatctgtgccgctacagataatatctgtgctttacagataatatctgtgatctacagataatatctgtacgctacagataatatctg

SEQ ID NO: 8128 - DNA, 135 bp, synthetic construct
  source 1..135: mol_type = other DNA
gagataacatctaatgatctgagataacatctaatacgctgagataacatctaatgccgctgagataacatctaatgctttgagataacatctaatgatctgagataacatctaatacgctgagataacatctaa

SEQ ID NO: 8129 - DNA, 135 bp, synthetic construct
  source 1..135: mol_type = other DNA
ttagatgttatctctgatctttagatgttatctctacgctttagatgttatctctgccgctttagatgttatctctgctttttagatgttatctctgatctttagatgttatctctacgctttagatgttatctc

SEQ ID NO: 8130 - DNA, 135 bp, synthetic construct
  source 1..135: mol_type = other DNA
gagataacatctactgatctgagataacatctactacgctgagataacatctactgccgctgagataacatctactgctttgagataacatctactgatctgagataacatctactacgctgagataacatctac

SEQ ID NO: 8131 - DNA, 135 bp, synthetic construct
  source 1..135: mol_type = other DNA
gtagatgttatctctgatctgtagatgttatctctacgctgtagatgttatctctgccgctgtagatgttatctctgctttgtagatgttatctctgatctgtagatgttatctctacgctgtagatgttatctc

SEQ ID NO: 8132 - DNA, 135 bp, synthetic construct
  source 1..135: mol_type = other DNA
gagataacatctattgatctgagataacatctattacgctgagataacatctattgccgctgagataacatctattgctttgagataacatctattgatctgagataacatctattacgctgagataacatctat

SEQ ID NO: 8133 - DNA, 135 bp, synthetic construct
  source 1..135: mol_type = other DNA
atagatgttatctctgatctatagatgttatctctacgctatagatgttatctctgccgctatagatgttatctctgctttatagatgttatctctgatctatagatgttatctctacgctatagatgttatctc

SEQ ID NO: 8134 - DNA, 135 bp, synthetic construct
  source 1..135: mol_type = other DNA
gagataacatctcatgatctgagataacatctcatacgctgagataacatctcatgccgctgagataacatctcatgctttgagataacatctcatgatctgagataacatctcatacgctgagataacatctca

SEQ ID NO: 8135 - DNA, 135 bp, synthetic construct
  source 1..135: mol_type = other DNA
tgagatgttatctctgatcttgagatgttatctctacgcttgagatgttatctctgccgcttgagatgttatctctgcttttgagatgttatctctgatcttgagatgttatctctacgcttgagatgttatctc

SEQ ID NO: 8136 - DNA, 135 bp, synthetic construct
  source 1..135: mol_type = other DNA
gagataacatctcctgatctgagataacatctcctacgctgagataacatctcctgccgctgagataacatctcctgctttgagataacatctcctgatctgagataacatctcctacgctgagataacatctcc

SEQ ID NO: 8137 - DNA, 135 bp, synthetic construct
  source 1..135: mol_type = other DNA
ggagatgttatctctgatctggagatgttatctctacgctggagatgttatctctgccgctggagatgttatctctgctttggagatgttatctctgatctggagatgttatctctacgctggagatgttatctc

SEQ ID NO: 8138 - DNA, 135 bp, synthetic construct
  source 1..135: mol_type = other DNA
gagataacatctcttgatctgagataacatctcttacgctgagataacatctcttgccgctgagataacatctcttgctttgagataacatctcttgatctgagataacatctcttacgctgagataacatctct

SEQ ID NO: 8139 - DNA, 135 bp, synthetic construct
  source 1..135: mol_type = other DNA
agagatgttatctctgatctagagatgttatctctacgctagagatgttatctctgccgctagagatgttatctctgctttagagatgttatctctgatctagagatgttatctctacgctagagatgttatctc

SEQ ID NO: 8140 - DNA, 135 bp, synthetic construct
  source 1..135: mol_type = other DNA
gagataacatctgatgatctgagataacatctgatacgctgagataacatctgatgccgctgagataacatctgatgctttgagataacatctgatgatctgagataacatctgatacgctgagataacatctga

SEQ ID NO: 8141 - DNA, 135 bp, synthetic construct
  source 1..135: mol_type = other DNA
tcagatgttatctctgatcttcagatgttatctctacgcttcagatgttatctctgccgcttcagatgttatctctgcttttcagatgttatctctgatcttcagatgttatctctacgcttcagatgttatctc

SEQ ID NO: 8142 - DNA, 135 bp, synthetic construct
  source 1..135: mol_type = other DNA
gagataacatctgctgatctgagataacatctgctacgctgagataacatctgctgccgctgagataacatctgctgctttgagataacatctgctgatctgagataacatctgctacgctgagataacatctgc

SEQ ID NO: 8143 - DNA, 135 bp, synthetic construct
  source 1..135: mol_type = other DNA
gcagatgttatctctgatctgcagatgttatctctacgctgcagatgttatctctgccgctgcagatgttatctctgctttgcagatgttatctctgatctgcagatgttatctctacgctgcagatgttatctc

SEQ ID NO: 8144 - DNA, 135 bp, synthetic construct
  source 1..135: mol_type = other DNA
gagataacatctgttgatctgagataacatctgttacgctgagataacatctgttgccgctgagataacatctgttgctttgagataacatctgttgatctgagataacatctgttacgctgagataacatctgt

SEQ ID NO: 8145 - DNA, 135 bp, synthetic construct
  source 1..135: mol_type = other DNA
acagatgttatctctgatctacagatgttatctctacgctacagatgttatctctgccgctacagatgttatctctgctttacagatgttatctctgatctacagatgttatctctacgctacagatgttatctc

SEQ ID NO: 8146 - DNA, 135 bp, synthetic construct
  source 1..135: mol_type = other DNA
gagataatatctaatgatctgagataatatctaatacgctgagataatatctaatgccgctgagataatatctaatgctttgagataatatctaatgatctgagataatatctaatacgctgagataatatctaa

SEQ ID NO: 8147 - DNA, 135 bp, synthetic construct
  source 1..135: mol_type = other DNA
ttagatattatctctgatctttagatattatctctacgctttagatattatctctgccgctttagatattatctctgctttttagatattatctctgatctttagatattatctctacgctttagatattatctc

SEQ ID NO: 8148 - DNA, 135 bp, synthetic construct
  source 1..135: mol_type = other DNA
gagataatatctactgatctgagataatatctactacgctgagataatatctactgccgctgagataatatctactgctttgagataatatctactgatctgagataatatctactacgctgagataatatctac

SEQ ID NO: 8149 - DNA, 135 bp, synthetic construct
  source 1..135: mol_type = other DNA
gtagatattatctctgatctgtagatattatctctacgctgtagatattatctctgccgctgtagatattatctctgctttgtagatattatctctgatctgtagatattatctctacgctgtagatattatctc

SEQ ID NO: 8150 - DNA, 135 bp, synthetic construct
  source 1..135: mol_type = other DNA
gagataatatctattgatctgagataatatctattacgctgagataatatctattgccgctgagataatatctattgctttgagataatatctattgatctgagataatatctattacgctgagataatatctat

SEQ ID NO: 8151 - DNA, 135 bp, synthetic construct
  source 1..135: mol_type = other DNA
atagatattatctctgatctatagatattatctctacgctatagatattatctctgccgctatagatattatctctgctttatagatattatctctgatctatagatattatctctacgctatagatattatctc

SEQ ID NO: 8152 - DNA, 135 bp, synthetic construct
  source 1..135: mol_type = other DNA
gagataatatctcatgatctgagataatatctcatacgctgagataatatctcatgccgctgagataatatctcatgctttgagataatatctcatgatctgagataatatctcatacgctgagataatatctca

SEQ ID NO: 8153 - DNA, 135 bp, synthetic construct
  source 1..135: mol_type = other DNA
tgagatattatctctgatcttgagatattatctctacgcttgagatattatctctgccgcttgagatattatctctgcttttgagatattatctctgatcttgagatattatctctacgcttgagatattatctc

SEQ ID NO: 8154 - DNA, 135 bp, synthetic construct
  source 1..135: mol_type = other DNA
gagataatatctcctgatctgagataatatctcctacgctgagataatatctcctgccgctgagataatatctcctgctttgagataatatctcctgatctgagataatatctcctacgctgagataatatctcc

SEQ ID NO: 8155 - DNA, 135 bp, synthetic construct
  source 1..135: mol_type = other DNA
ggagatattatctctgatctggagatattatctctacgctggagatattatctctgccgctggagatattatctctgctttggagatattatctctgatctggagatattatctctacgctggagatattatctc

SEQ ID NO: 8156 - DNA, 135 bp, synthetic construct
  source 1..135: mol_type = other DNA
gagataatatctcttgatctgagataatatctcttacgctgagataatatctcttgccgctgagataatatctcttgctttgagataatatctcttgatctgagataatatctcttacgctgagataatatctct

SEQ ID NO: 8157 - DNA, 135 bp, synthetic construct
  source 1..135: mol_type = other DNA
agagatattatctctgatctagagatattatctctacgctagagatattatctctgccgctagagatattatctctgctttagagatattatctctgatctagagatattatctctacgctagagatattatctc

SEQ ID NO: 8158 - DNA, 135 bp, synthetic construct
  source 1..135: mol_type = other DNA
gagataatatctgatgatctgagataatatctgatacgctgagataatatctgatgccgctgagataatatctgatgctttgagataatatctgatgatctgagataatatctgatacgctgagataatatctga

SEQ ID NO: 8159 - DNA, 135 bp, synthetic construct
  source 1..135: mol_type = other DNA
tcagatattatctctgatcttcagatattatctctacgcttcagatattatctctgccgcttcagatattatctctgcttttcagatattatctctgatcttcagatattatctctacgcttcagatattatctc

SEQ ID NO: 8160 - DNA, 135 bp, synthetic construct
  source 1..135: mol_type = other DNA
gagataatatctgctgatctgagataatatctgctacgctgagataatatctgctgccgctgagataatatctgctgctttgagataatatctgctgatctgagataatatctgctacgctgagataatatctgc

SEQ ID NO: 8161 - DNA, 135 bp, synthetic construct
  source 1..135: mol_type = other DNA
gcagatattatctctgatctgcagatattatctctacgctgcagatattatctctgccgctgcagatattatctctgctttgcagatattatctctgatctgcagatattatctctacgctgcagatattatctc

SEQ ID NO: 8162 - DNA, 135 bp, synthetic construct
  source 1..135: mol_type = other DNA
gagataatatctgttgatctgagataatatctgttacgctgagataatatctgttgccgctgagataatatctgttgctttgagataatatctgttgatctgagataatatctgttacgctgagataatatctgt

SEQ ID NO: 8163 - DNA, 135 bp, synthetic construct
  source 1..135: mol_type = other DNA
acagatattatctctgatctacagatattatctctacgctacagatattatctctgccgctacagatattatctctgctttacagatattatctctgatctacagatattatctctacgctacagatattatctc

SEQ ID NO: 8164 - DNA, 135 bp, synthetic construct
  source 1..135: mol_type = other DNA
gagatatcatctaatgatctgagatatcatctaatacgctgagatatcatctaatgccgctgagatatcatctaatgctttgagatatcatctaatgatctgagatatcatctaatacgctgagatatcatctaa

SEQ ID NO: 8165 - DNA, 135 bp, synthetic construct
  source 1..135: mol_type = other DNA
ttagatgatatctctgatctttagatgatatctctacgctttagatgatatctctgccgctttagatgatatctctgctttttagatgatatctctgatctttagatgatatctctacgctttagatgatatctc

SEQ ID NO: 8166 - DNA, 135 bp, synthetic construct
  source 1..135: mol_type = other DNA
gagatatcatctactgatctgagatatcatctactacgctgagatatcatctactgccgctgagatatcatctactgctttgagatatcatctactgatctgagatatcatctactacgctgagatatcatctac

SEQ ID NO: 8167 - DNA, 135 bp, synthetic construct
  source 1..135: mol_type = other DNA
gtagatgatatctctgatctgtagatgatatctctacgctgtagatgatatctctgccgctgtagatgatatctctgctttgtagatgatatctctgatctgtagatgatatctctacgctgtagatgatatctc

SEQ ID NO: 8168 - DNA, 135 bp, synthetic construct
  source 1..135: mol_type = other DNA
gagatatcatctattgatctgagatatcatctattacgctgagatatcatctattgccgctgagatatcatctattgctttgagatatcatctattgatctgagatatcatctattacgctgagatatcatctat

SEQ ID NO: 8169 - DNA, 135 bp, synthetic construct
  source 1..135: mol_type = other DNA
atagatgatatctctgatctatagatgatatctctacgctatagatgatatctctgccgctatagatgatatctctgctttatagatgatatctctgatctatagatgatatctctacgctatagatgatatctc

SEQ ID NO: 8170 - DNA, 135 bp, synthetic construct
  source 1..135: mol_type = other DNA
gagatatcatctcatgatctgagatatcatctcatacgctgagatatcatctcatgccgctgagatatcatctcatgctttgagatatcatctcatgatctgagatatcatctcatacgctgagatatcatctca

SEQ ID NO: 8171 - DNA, 135 bp, synthetic construct
  source 1..135: mol_type = other DNA
tgagatgatatctctgatcttgagatgatatctctacgcttgagatgatatctctgccgcttgagatgatatctctgcttttgagatgatatctctgatcttgagatgatatctctacgcttgagatgatatctc

SEQ ID NO: 8172 - DNA, 135 bp, synthetic construct
  source 1..135: mol_type = other DNA
gagatatcatctcctgatctgagatatcatctcctacgctgagatatcatctcctgccgctgagatatcatctcctgctttgagatatcatctcctgatctgagatatcatctcctacgctgagatatcatctcc

SEQ ID NO: 8173 - DNA, 135 bp, synthetic construct
  source 1..135: mol_type = other DNA
ggagatgatatctctgatctggagatgatatctctacgctggagatgatatctctgccgctggagatgatatctctgctttggagatgatatctctgatctggagatgatatctctacgctggagatgatatctc

SEQ ID NO: 8174 - DNA, 135 bp, synthetic construct
  source 1..135: mol_type = other DNA
gagatatcatctcttgatctgagatatcatctcttacgctgagatatcatctcttgccgctgagatatcatctcttgctttgagatatcatctcttgatctgagatatcatctcttacgctgagatatcatctct

SEQ ID NO: 8175 - DNA, 135 bp, synthetic construct
  source 1..135: mol_type = other DNA
agagatgatatctctgatctagagatgatatctctacgctagagatgatatctctgccgctagagatgatatctctgctttagagatgatatctctgatctagagatgatatctctacgctagagatgatatctc

SEQ ID NO: 8176 - DNA, 135 bp, synthetic construct
  source 1..135: mol_type = other DNA
gagatatcatctgatgatctgagatatcatctgatacgctgagatatcatctgatgccgctgagatatcatctgatgctttgagatatcatctgatgatctgagatatcatctgatacgctgagatatcatctga

SEQ ID NO: 8177 - DNA, 135 bp, synthetic construct
  source 1..135: mol_type = other DNA
tcagatgatatctctgatcttcagatgatatctctacgcttcagatgatatctctgccgcttcagatgatatctctgcttttcagatgatatctctgatcttcagatgatatctctacgcttcagatgatatctc

SEQ ID NO: 8178 - DNA, 135 bp, synthetic construct
  source 1..135: mol_type = other DNA
gagatatcatctgctgatctgagatatcatctgctacgctgagatatcatctgctgccgctgagatatcatctgctgctttgagatatcatctgctgatctgagatatcatctgctacgctgagatatcatctgc

SEQ ID NO: 8179 - DNA, 135 bp, synthetic construct
  source 1..135: mol_type = other DNA
gcagatgatatctctgatctgcagatgatatctctacgctgcagatgatatctctgccgctgcagatgatatctctgctttgcagatgatatctctgatctgcagatgatatctctacgctgcagatgatatctc

SEQ ID NO: 8180 - DNA, 135 bp, synthetic construct
  source 1..135: mol_type = other DNA
gagatatcatctgttgatctgagatatcatctgttacgctgagatatcatctgttgccgctgagatatcatctgttgctttgagatatcatctgttgatctgagatatcatctgttacgctgagatatcatctgt

SEQ ID NO: 8181 - DNA, 135 bp, synthetic construct
  source 1..135: mol_type = other DNA
acagatgatatctctgatctacagatgatatctctacgctacagatgatatctctgccgctacagatgatatctctgctttacagatgatatctctgatctacagatgatatctctacgctacagatgatatctc

SEQ ID NO: 8182 - DNA, 135 bp, synthetic construct
  source 1..135: mol_type = other DNA
gagatattatctaatgatctgagatattatctaatacgctgagatattatctaatgccgctgagatattatctaatgctttgagatattatctaatgatctgagatattatctaatacgctgagatattatctaa

SEQ ID NO: 8183 - DNA, 135 bp, synthetic construct
  source 1..135: mol_type = other DNA
ttagataatatctctgatctttagataatatctctacgctttagataatatctctgccgctttagataatatctctgctttttagataatatctctgatctttagataatatctctacgctttagataatatctc

SEQ ID NO: 8184 - DNA, 135 bp, synthetic construct
  source 1..135: mol_type = other DNA
gagatattatctactgatctgagatattatctactacgctgagatattatctactgccgctgagatattatctactgctttgagatattatctactgatctgagatattatctactacgctgagatattatctac

SEQ ID NO: 8185 - DNA, 135 bp, synthetic construct
  source 1..135: mol_type = other DNA
gtagataatatctctgatctgtagataatatctctacgctgtagataatatctctgccgctgtagataatatctctgctttgtagataatatctctgatctgtagataatatctctacgctgtagataatatctc

SEQ ID NO: 8186 - DNA, 135 bp, synthetic construct
  source 1..135: mol_type = other DNA
gagatattatctattgatctgagatattatctattacgctgagatattatctattgccgctgagatattatctattgctttgagatattatctattgatctgagatattatctattacgctgagatattatctat

SEQ ID NO: 8187 - DNA, 135 bp, synthetic construct
  source 1..135: mol_type = other DNA
atagataatatctctgatctatagataatatctctacgctatagataatatctctgccgctatagataatatctctgctttatagataatatctctgatctatagataatatctctacgctatagataatatctc

SEQ ID NO: 8188 - DNA, 135 bp, synthetic construct
  source 1..135: mol_type = other DNA
gagatattatctcatgatctgagatattatctcatacgctgagatattatctcatgccgctgagatattatctcatgctttgagatattatctcatgatctgagatattatctcatacgctgagatattatctca

SEQ ID NO: 8189 - DNA, 135 bp, synthetic construct
  source 1..135: mol_type = other DNA
tgagataatatctctgatcttgagataatatctctacgcttgagataatatctctgccgcttgagataatatctctgcttttgagataatatctctgatcttgagataatatctctacgcttgagataatatctc

SEQ ID NO: 8190 - DNA, 135 bp, synthetic construct
  source 1..135: mol_type = other DNA
gagatattatctcctgatctgagatattatctcctacgctgagatattatctcctgccgctgagatattatctcctgctttgagatattatctcctgatctgagatattatctcctacgctgagatattatctcc

SEQ ID NO: 8191 - DNA, 135 bp, synthetic construct
  source 1..135: mol_type = other DNA
ggagataatatctctgatctggagataatatctctacgctggagataatatctctgccgctggagataatatctctgctttggagataatatctctgatctggagataatatctctacgctggagataatatctc

SEQ ID NO: 8192 - DNA, 135 bp, synthetic construct
  source 1..135: mol_type = other DNA
gagatattatctcttgatctgagatattatctcttacgctgagatattatctcttgccgctgagatattatctcttgctttgagatattatctcttgatctgagatattatctcttacgctgagatattatctct

SEQ ID NO: 8193 - DNA, 135 bp, synthetic construct
  source 1..135: mol_type = other DNA
agagataatatctctgatctagagataatatctctacgctagagataatatctctgccgctagagataatatctctgctttagagataatatctctgatctagagataatatctctacgctagagataatatctc

SEQ ID NO: 8194 - DNA, 135 bp, synthetic construct
  source 1..135: mol_type = other DNA
gagatattatctgatgatctgagatattatctgatacgctgagatattatctgatgccgctgagatattatctgatgctttgagatattatctgatgatctgagatattatctgatacgctgagatattatctga

SEQ ID NO: 8195 - DNA, 135 bp, synthetic construct
  source 1..135: mol_type = other DNA
tcagataatatctctgatcttcagataatatctctacgcttcagataatatctctgccgcttcagataatatctctgcttttcagataatatctctgatcttcagataatatctctacgcttcagataatatctc

SEQ ID NO: 8196 - DNA, 135 bp, synthetic construct
  source 1..135: mol_type = other DNA
gagatattatctgctgatctgagatattatctgctacgctgagatattatctgctgccgctgagatattatctgctgctttgagatattatctgctgatctgagatattatctgctacgctgagatattatctgc

SEQ ID NO: 8197 - DNA, 135 bp, synthetic construct
  source 1..135: mol_type = other DNA
gcagataatatctctgatctgcagataatatctctacgctgcagataatatctctgccgctgcagataatatctctgctttgcagataatatctctgatctgcagataatatctctacgctgcagataatatctc

SEQ ID NO: 8198 - DNA, 135 bp, synthetic construct
  source 1..135: mol_type = other DNA
gagatattatctgttgatctgagatattatctgttacgctgagatattatctgttgccgctgagatattatctgttgctttgagatattatctgttgatctgagatattatctgttacgctgagatattatctgt

SEQ ID NO: 8199 - DNA, 135 bp, synthetic construct
  source 1..135: mol_type = other DNA
acagataatatctctgatctacagataatatctctacgctacagataatatctctgccgctacagataatatctctgctttacagataatatctctgatctacagataatatctctacgctacagataatatctc

SEQ ID NO: 8200 - DNA, 135 bp, synthetic construct
  source 1..135: mol_type = other DNA
tagataacatctaatgatcttagataacatctaatacgcttagataacatctaatgccgcttagataacatctaatgcttttagataacatctaatgatcttagataacatctaatacgcttagataacatctaa

SEQ ID NO: 8201 - DNA, 135 bp, synthetic construct
  source 1..135: mol_type = other DNA
ttagatgttatctatgatctttagatgttatctatacgctttagatgttatctatgccgctttagatgttatctatgctttttagatgttatctatgatctttagatgttatctatacgctttagatgttatcta

SEQ ID NO: 8202 - DNA, 135 bp, synthetic construct
  source 1..135: mol_type = other DNA
tagataacatctactgatcttagataacatctactacgcttagataacatctactgccgcttagataacatctactgcttttagataacatctactgatcttagataacatctactacgcttagataacatctac

SEQ ID NO: 8203 - DNA, 135 bp, synthetic construct
  source 1..135: mol_type = other DNA
gtagatgttatctatgatctgtagatgttatctatacgctgtagatgttatctatgccgctgtagatgttatctatgctttgtagatgttatctatgatctgtagatgttatctatacgctgtagatgttatcta

SEQ ID NO: 8204 - DNA, 135 bp, synthetic construct
  source 1..135: mol_type = other DNA
tagataacatctattgatcttagataacatctattacgcttagataacatctattgccgcttagataacatctattgcttttagataacatctattgatcttagataacatctattacgcttagataacatctat

SEQ ID NO: 8205 - DNA, 135 bp, synthetic construct
  source 1..135: mol_type = other DNA
atagatgttatctatgatctatagatgttatctatacgctatagatgttatctatgccgctatagatgttatctatgctttatagatgttatctatgatctatagatgttatctatacgctatagatgttatcta

SEQ ID NO: 8206 - DNA, 135 bp, synthetic construct
  source 1..135: mol_type = other DNA
tagataacatctcatgatcttagataacatctcatacgcttagataacatctcatgccgcttagataacatctcatgcttttagataacatctcatgatcttagataacatctcatacgcttagataacatctca

SEQ ID NO: 8207 - DNA, 135 bp, synthetic construct
  source 1..135: mol_type = other DNA
tgagatgttatctatgatcttgagatgttatctatacgcttgagatgttatctatgccgcttgagatgttatctatgcttttgagatgttatctatgatcttgagatgttatctatacgcttgagatgttatcta

SEQ ID NO: 8208 - DNA, 135 bp, synthetic construct
  source 1..135: mol_type = other DNA
tagataacatctcctgatcttagataacatctcctacgcttagataacatctcctgccgcttagataacatctcctgcttttagataacatctcctgatcttagataacatctcctacgcttagataacatctcc

SEQ ID NO: 8209 - DNA, 135 bp, synthetic construct
  source 1..135: mol_type = other DNA
ggagatgttatctatgatctggagatgttatctatacgctggagatgttatctatgccgctggagatgttatctatgctttggagatgttatctatgatctggagatgttatctatacgctggagatgttatcta

SEQ ID NO: 8210 - DNA, 135 bp, synthetic construct
  source 1..135: mol_type = other DNA
tagataacatctcttgatcttagataacatctcttacgcttagataacatctcttgccgcttagataacatctcttgcttttagataacatctcttgatcttagataacatctcttacgcttagataacatctct

SEQ ID NO: 8211 - DNA, 135 bp, synthetic construct
  source 1..135: mol_type = other DNA
agagatgttatctatgatctagagatgttatctatacgctagagatgttatctatgccgctagagatgttatctatgctttagagatgttatctatgatctagagatgttatctatacgctagagatgttatcta

SEQ ID NO: 8212 - DNA, 135 bp, synthetic construct
  source 1..135: mol_type = other DNA
tagataacatctgatgatcttagataacatctgatacgcttagataacatctgatgccgcttagataacatctgatgcttttagataacatctgatgatcttagataacatctgatacgcttagataacatctga

SEQ ID NO: 8213 - DNA, 135 bp, synthetic construct
  source 1..135: mol_type = other DNA
tcagatgttatctatgatcttcagatgttatctatacgcttcagatgttatctatgccgcttcagatgttatctatgcttttcagatgttatctatgatcttcagatgttatctatacgcttcagatgttatcta

SEQ ID NO: 8214 - DNA, 135 bp, synthetic construct
  source 1..135: mol_type = other DNA
tagataacatctgctgatcttagataacatctgctacgcttagataacatctgctgccgcttagataacatctgctgcttttagataacatctgctgatcttagataacatctgctacgcttagataacatctgc

SEQ ID NO: 8215 - DNA, 135 bp, synthetic construct
  source 1..135: mol_type = other DNA
gcagatgttatctatgatctgcagatgttatctatacgctgcagatgttatctatgccgctgcagatgttatctatgctttgcagatgttatctatgatctgcagatgttatctatacgctgcagatgttatcta

SEQ ID NO: 8216 - DNA, 135 bp, synthetic construct
  source 1..135: mol_type = other DNA
tagataacatctgttgatcttagataacatctgttacgcttagataacatctgttgccgcttagataacatctgttgcttttagataacatctgttgatcttagataacatctgttacgcttagataacatctgt

SEQ ID NO: 8217 - DNA, 135 bp, synthetic construct
  source 1..135: mol_type = other DNA
acagatgttatctatgatctacagatgttatctatacgctacagatgttatctatgccgctacagatgttatctatgctttacagatgttatctatgatctacagatgttatctatacgctacagatgttatcta

SEQ ID NO: 8218 - DNA, 135 bp, synthetic construct
  source 1..135: mol_type = other DNA
tagataatatctaatgatcttagataatatctaatacgcttagataatatctaatgccgcttagataatatctaatgcttttagataatatctaatgatcttagataatatctaatacgcttagataatatctaa

SEQ ID NO: 8219 - DNA, 135 bp, synthetic construct
  source 1..135: mol_type = other DNA
ttagatattatctatgatctttagatattatctatacgctttagatattatctatgccgctttagatattatctatgctttttagatattatctatgatctttagatattatctatacgctttagatattatcta

SEQ ID NO: 8220 - DNA, 135 bp, synthetic construct
  source 1..135: mol_type = other DNA
tagataatatctactgatcttagataatatctactacgcttagataatatctactgccgcttagataatatctactgcttttagataatatctactgatcttagataatatctactacgcttagataatatctac

SEQ ID NO: 8221 - DNA, 135 bp, synthetic construct
  source 1..135: mol_type = other DNA
gtagatattatctatgatctgtagatattatctatacgctgtagatattatctatgccgctgtagatattatctatgctttgtagatattatctatgatctgtagatattatctatacgctgtagatattatcta

SEQ ID NO: 8222 - DNA, 135 bp, synthetic construct
  source 1..135: mol_type = other DNA
tagataatatctattgatcttagataatatctattacgcttagataatatctattgccgcttagataatatctattgcttttagataatatctattgatcttagataatatctattacgcttagataatatctat

SEQ ID NO: 8223 - DNA, 135 bp, synthetic construct
  source 1..135: mol_type = other DNA
atagatattatctatgatctatagatattatctatacgctatagatattatctatgccgctatagatattatctatgctttatagatattatctatgatctatagatattatctatacgctatagatattatcta

SEQ ID NO: 8224 - DNA, 135 bp, synthetic construct
  source 1..135: mol_type = other DNA
tagataatatctcatgatcttagataatatctcatacgcttagataatatctcatgccgcttagataatatctcatgcttttagataatatctcatgatcttagataatatctcatacgcttagataatatctca

SEQ ID NO: 8225 - DNA, 135 bp, synthetic construct
  source 1..135: mol_type = other DNA
tgagatattatctatgatcttgagatattatctatacgcttgagatattatctatgccgcttgagatattatctatgcttttgagatattatctatgatcttgagatattatctatacgcttgagatattatcta

SEQ ID NO: 8226 - DNA, 135 bp, synthetic construct
  source 1..135: mol_type = other DNA
tagataatatctcctgatcttagataatatctcctacgcttagataatatctcctgccgcttagataatatctcctgcttttagataatatctcctgatcttagataatatctcctacgcttagataatatctcc

SEQ ID NO: 8227 - DNA, 135 bp, synthetic construct
  source 1..135: mol_type = other DNA
ggagatattatctatgatctggagatattatctatacgctggagatattatctatgccgctggagatattatctatgctttggagatattatctatgatctggagatattatctatacgctggagatattatcta

SEQ ID NO: 8228 - DNA, 135 bp, synthetic construct
  source 1..135: mol_type = other DNA
tagataatatctcttgatcttagataatatctcttacgcttagataatatctcttgccgcttagataatatctcttgcttttagataatatctcttgatcttagataatatctcttacgcttagataatatctct

SEQ ID NO: 8229 - DNA, 135 bp, synthetic construct
  source 1..135: mol_type = other DNA
agagatattatctatgatctagagatattatctatacgctagagatattatctatgccgctagagatattatctatgctttagagatattatctatgatctagagatattatctatacgctagagatattatcta

SEQ ID NO: 8230 - DNA, 135 bp, synthetic construct
  source 1..135: mol_type = other DNA
tagataatatctgatgatcttagataatatctgatacgcttagataatatctgatgccgcttagataatatctgatgcttttagataatatctgatgatcttagataatatctgatacgcttagataatatctga

SEQ ID NO: 8231 - DNA, 135 bp, synthetic construct
  source 1..135: mol_type = other DNA
tcagatattatctatgatcttcagatattatctatacgcttcagatattatctatgccgcttcagatattatctatgcttttcagatattatctatgatcttcagatattatctatacgcttcagatattatcta

SEQ ID NO: 8232 - DNA, 135 bp, synthetic construct
  source 1..135: mol_type = other DNA
tagataatatctgctgatcttagataatatctgctacgcttagataatatctgctgccgcttagataatatctgctgcttttagataatatctgctgatcttagataatatctgctacgcttagataatatctgc

SEQ ID NO: 8233 - DNA, 135 bp, synthetic construct
  source 1..135: mol_type = other DNA
gcagatattatctatgatctgcagatattatctatacgctgcagatattatctatgccgctgcagatattatctatgctttgcagatattatctatgatctgcagatattatctatacgctgcagatattatcta

SEQ ID NO: 8234 - DNA, 135 bp, synthetic construct
  source 1..135: mol_type = other DNA
tagataatatctgttgatcttagataatatctgttacgcttagataatatctgttgccgcttagataatatctgttgcttttagataatatctgttgatcttagataatatctgttacgcttagataatatctgt

SEQ ID NO: 8235 - DNA, 135 bp, synthetic construct
  source 1..135: mol_type = other DNA
acagatattatctatgatctacagatattatctatacgctacagatattatctatgccgctacagatattatctatgctttacagatattatctatgatctacagatattatctatacgctacagatattatcta

SEQ ID NO: 8236 - DNA, 135 bp, synthetic construct
  source 1..135: mol_type = other DNA
tagatatcatctaatgatcttagatatcatctaatacgcttagatatcatctaatgccgcttagatatcatctaatgcttttagatatcatctaatgatcttagatatcatctaatacgcttagatatcatctaa

SEQ ID NO: 8237 - DNA, 135 bp, synthetic construct
  source 1..135: mol_type = other DNA
ttagatgatatctatgatctttagatgatatctatacgctttagatgatatctatgccgctttagatgatatctatgctttttagatgatatctatgatctttagatgatatctatacgctttagatgatatcta

SEQ ID NO: 8238 - DNA, 135 bp, synthetic construct
  source 1..135: mol_type = other DNA
tagatatcatctactgatcttagatatcatctactacgcttagatatcatctactgccgcttagatatcatctactgcttttagatatcatctactgatcttagatatcatctactacgcttagatatcatctac

SEQ ID NO: 8239 - DNA, 135 bp, synthetic construct
  source 1..135: mol_type = other DNA
gtagatgatatctatgatctgtagatgatatctatacgctgtagatgatatctatgccgctgtagatgatatctatgctttgtagatgatatctatgatctgtagatgatatctatacgctgtagatgatatcta

SEQ ID NO: 8240 - DNA, 135 bp, synthetic construct
  source 1..135: mol_type = other DNA
tagatatcatctattgatcttagatatcatctattacgcttagatatcatctattgccgcttagatatcatctattgcttttagatatcatctattgatcttagatatcatctattacgcttagatatcatctat

SEQ ID NO: 8241 - DNA, 135 bp, synthetic construct
  source 1..135: mol_type = other DNA
atagatgatatctatgatctatagatgatatctatacgctatagatgatatctatgccgctatagatgatatctatgctttatagatgatatctatgatctatagatgatatctatacgctatagatgatatcta

SEQ ID NO: 8242 - DNA, 135 bp, synthetic construct
  source 1..135: mol_type = other DNA
tagatatcatctcatgatcttagatatcatctcatacgcttagatatcatctcatgccgcttagatatcatctcatgcttttagatatcatctcatgatcttagatatcatctcatacgcttagatatcatctca

SEQ ID NO: 8243 - DNA, 135 bp, synthetic construct
  source 1..135: mol_type = other DNA
tgagatgatatctatgatcttgagatgatatctatacgcttgagatgatatctatgccgcttgagatgatatctatgcttttgagatgatatctatgatcttgagatgatatctatacgcttgagatgatatcta

SEQ ID NO: 8244 - DNA, 135 bp, synthetic construct
  source 1..135: mol_type = other DNA
tagatatcatctcctgatcttagatatcatctcctacgcttagatatcatctcctgccgcttagatatcatctcctgcttttagatatcatctcctgatcttagatatcatctcctacgcttagatatcatctcc

SEQ ID NO: 8245 - DNA, 135 bp, synthetic construct
  source 1..135: mol_type = other DNA
ggagatgatatctatgatctggagatgatatctatacgctggagatgatatctatgccgctggagatgatatctatgctttggagatgatatctatgatctggagatgatatctatacgctggagatgatatcta

SEQ ID NO: 8246 - DNA, 135 bp, synthetic construct
  source 1..135: mol_type = other DNA
tagatatcatctcttgatcttagatatcatctcttacgcttagatatcatctcttgccgcttagatatcatctcttgcttttagatatcatctcttgatcttagatatcatctcttacgcttagatatcatctct

SEQ ID NO: 8247 - DNA, 135 bp, synthetic construct
  source 1..135: mol_type = other DNA
agagatgatatctatgatctagagatgatatctatacgctagagatgatatctatgccgctagagatgatatctatgctttagagatgatatctatgatctagagatgatatctatacgctagagatgatatcta

SEQ ID NO: 8248 - DNA, 135 bp, synthetic construct
  source 1..135: mol_type = other DNA
tagatatcatctgatgatcttagatatcatctgatacgcttagatatcatctgatgccgcttagatatcatctgatgcttttagatatcatctgatgatcttagatatcatctgatacgcttagatatcatctga

SEQ ID NO: 8249 - DNA, 135 bp, synthetic construct
  source 1..135: mol_type = other DNA
tcagatgatatctatgatcttcagatgatatctatacgcttcagatgatatctatgccgcttcagatgatatctatgcttttcagatgatatctatgatcttcagatgatatctatacgcttcagatgatatcta

SEQ ID NO: 8250 - DNA, 135 bp, synthetic construct
  source 1..135: mol_type = other DNA
tagatatcatctgctgatcttagatatcatctgctacgcttagatatcatctgctgccgcttagatatcatctgctgcttttagatatcatctgctgatcttagatatcatctgctacgcttagatatcatctgc

SEQ ID NO: 8251 - DNA, 135 bp, synthetic construct
  source 1..135: mol_type = other DNA
gcagatgatatctatgatctgcagatgatatctatacgctgcagatgatatctatgccgctgcagatgatatctatgctttgcagatgatatctatgatctgcagatgatatctatacgctgcagatgatatcta

SEQ ID NO: 8252 - DNA, 135 bp, synthetic construct
  source 1..135: mol_type = other DNA
tagatatcatctgttgatcttagatatcatctgttacgcttagatatcatctgttgccgcttagatatcatctgttgcttttagatatcatctgttgatcttagatatcatctgttacgcttagatatcatctgt

SEQ ID NO: 8253 - DNA, 135 bp, synthetic construct
  source 1..135: mol_type = other DNA
acagatgatatctatgatctacagatgatatctatacgctacagatgatatctatgccgctacagatgatatctatgctttacagatgatatctatgatctacagatgatatctatacgctacagatgatatcta

SEQ ID NO: 8254 - DNA, 135 bp, synthetic construct
  source 1..135: mol_type = other DNA
tagatattatctaatgatcttagatattatctaatacgcttagatattatctaatgccgcttagatattatctaatgcttttagatattatctaatgatcttagatattatctaatacgcttagatattatctaa

SEQ ID NO: 8255 - DNA, 135 bp, synthetic construct
  source 1..135: mol_type = other DNA
ttagataatatctatgatctttagataatatctatacgctttagataatatctatgccgctttagataatatctatgctttttagataatatctatgatctttagataatatctatacgctttagataatatcta

SEQ ID NO: 8256 - DNA, 135 bp, synthetic construct
  source 1..135: mol_type = other DNA
tagatattatctactgatcttagatattatctactacgcttagatattatctactgccgcttagatattatctactgcttttagatattatctactgatcttagatattatctactacgcttagatattatctac

SEQ ID NO: 8257 - DNA, 135 bp, synthetic construct
  source 1..135: mol_type = other DNA
gtagataatatctatgatctgtagataatatctatacgctgtagataatatctatgccgctgtagataatatctatgctttgtagataatatctatgatctgtagataatatctatacgctgtagataatatcta

SEQ ID NO: 8258 - DNA, 135 bp, synthetic construct
  source 1..135: mol_type = other DNA
tagatattatctattgatcttagatattatctattacgcttagatattatctattgccgcttagatattatctattgcttttagatattatctattgatcttagatattatctattacgcttagatattatctat

SEQ ID NO: 8259 - DNA, 135 bp, synthetic construct
  source 1..135: mol_type = other DNA
atagataatatctatgatctatagataatatctatacgctatagataatatctatgccgctatagataatatctatgctttatagataatatctatgatctatagataatatctatacgctatagataatatcta

SEQ ID NO: 8260 - DNA, 135 bp, synthetic construct
  source 1..135: mol_type = other DNA
tagatattatctcatgatcttagatattatctcatacgcttagatattatctcatgccgcttagatattatctcatgcttttagatattatctcatgatcttagatattatctcatacgcttagatattatctca

SEQ ID NO: 8261 - DNA, 135 bp, synthetic construct
  source 1..135: mol_type = other DNA
tgagataatatctatgatcttgagataatatctatacgcttgagataatatctatgccgcttgagataatatctatgcttttgagataatatctatgatcttgagataatatctatacgcttgagataatatcta

SEQ ID NO: 8262 - DNA, 135 bp, synthetic construct
  source 1..135: mol_type = other DNA
tagatattatctcctgatcttagatattatctcctacgcttagatattatctcctgccgcttagatattatctcctgcttttagatattatctcctgatcttagatattatctcctacgcttagatattatctcc

SEQ ID NO: 8263 - DNA, 135 bp, synthetic construct
  source 1..135: mol_type = other DNA
ggagataatatctatgatctggagataatatctatacgctggagataatatctatgccgctggagataatatctatgctttggagataatatctatgatctggagataatatctatacgctggagataatatcta

SEQ ID NO: 8264 - DNA, 135 bp, synthetic construct
  source 1..135: mol_type = other DNA
tagatattatctcttgatcttagatattatctcttacgcttagatattatctcttgccgcttagatattatctcttgcttttagatattatctcttgatcttagatattatctcttacgcttagatattatctct

SEQ ID NO: 8265 - DNA, 135 bp, synthetic construct
  source 1..135: mol_type = other DNA
agagataatatctatgatctagagataatatctatacgctagagataatatctatgccgctagagataatatctatgctttagagataatatctatgatctagagataatatctatacgctagagataatatcta

SEQ ID NO: 8266 - DNA, 135 bp, synthetic construct
  source 1..135: mol_type = other DNA
tagatattatctgatgatcttagatattatctgatacgcttagatattatctgatgccgcttagatattatctgatgcttttagatattatctgatgatcttagatattatctgatacgcttagatattatctga

SEQ ID NO: 8267 - DNA, 135 bp, synthetic construct
  source 1..135: mol_type = other DNA
tcagataatatctatgatcttcagataatatctatacgcttcagataatatctatgccgcttcagataatatctatgcttttcagataatatctatgatcttcagataatatctatacgcttcagataatatcta

SEQ ID NO: 8268 - DNA, 135 bp, synthetic construct
  source 1..135: mol_type = other DNA
tagatattatctgctgatcttagatattatctgctacgcttagatattatctgctgccgcttagatattatctgctgcttttagatattatctgctgatcttagatattatctgctacgcttagatattatctgc

SEQ ID NO: 8269 - DNA, 135 bp, synthetic construct
  source 1..135: mol_type = other DNA
gcagataatatctatgatctgcagataatatctatacgctgcagataatatctatgccgctgcagataatatctatgctttgcagataatatctatgatctgcagataatatctatacgctgcagataatatcta

SEQ ID NO: 8270 - DNA, 135 bp, synthetic construct
  source 1..135: mol_type = other DNA
tagatattatctgttgatcttagatattatctgttacgcttagatattatctgttgccgcttagatattatctgttgcttttagatattatctgttgatcttagatattatctgttacgcttagatattatctgt

SEQ ID NO: 8271 - DNA, 135 bp, synthetic construct
  source 1..135: mol_type = other DNA
acagataatatctatgatctacagataatatctatacgctacagataatatctatgccgctacagataatatctatgctttacagataatatctatgatctacagataatatctatacgctacagataatatcta

SEQ ID NO: 8272 - DNA, 140 bp, synthetic construct
  source 1..140: mol_type = other DNA
acttcctgctttacttcctgatctacttcctacgctacttcctgccgctacttcctgctttacttcctgatctacttcctacgctacttcctgccgctacttcctgctttacttcctgatctacttcctacgctacttcc

SEQ ID NO: 8273 - DNA, 140 bp, synthetic construct
  source 1..140: mol_type = other DNA
ggaagttgctttggaagttgatctggaagttacgctggaagttgccgctggaagttgctttggaagttgatctggaagttacgctggaagttgccgctggaagttgctttggaagttgatctggaagttacgctggaagt

SEQ ID NO: 8274 - DNA, 140 bp, synthetic construct
  source 1..140: mol_type = other DNA
atttcctgctttatttcctgatctatttcctacgctatttcctgccgctatttcctgctttatttcctgatctatttcctacgctatttcctgccgctatttcctgctttatttcctgatctatttcctacgctatttcc

SEQ ID NO: 8275 - DNA, 140 bp, synthetic construct
  source 1..140: mol_type = other DNA
ggaaattgctttggaaattgatctggaaattacgctggaaattgccgctggaaattgctttggaaattgatctggaaattacgctggaaattgccgctggaaattgctttggaaattgatctggaaattacgctggaaat

SEQ ID NO: 8276 - DNA, 136 bp, synthetic construct
  source 1..136: mol_type = other DNA
gtcacgtgtacgctgtcacgtgtgccgctgtcacgtgtgctttgtcacgtgtgatctgtcacgtgtacgctgtcacgtgtgccgctgtcacgtgtgctttgtcacgtgtgatctgtcacgtgtacgctgtcacgtg

SEQ ID NO: 8277 - DNA, 136 bp, synthetic construct
  source 1..136: mol_type = other DNA
cacgtgactacgctcacgtgactgccgctcacgtgactgctttcacgtgactgatctcacgtgactacgctcacgtgactgccgctcacgtgactgctttcacgtgactgatctcacgtgactacgctcacgtgac

SEQ ID NO: 8278 - DNA, 147 bp, synthetic construct
  source 1..147: mol_type = other DNA
ctgtgcatttttttgctttctgtgcatttttttgatctctgtgcatttttttacgctctgtgcatttttttgccgctctgtgcatttttttgctttctgtgcatttttttgatctctgtgcatttttttacgctctgtgcatttttt

SEQ ID NO: 8279 - DNA, 147 bp, synthetic construct
  source 1..147: mol_type = other DNA
aaaaaatgcacagtgctttaaaaaatgcacagtgatctaaaaaatgcacagtacgctaaaaaatgcacagtgccgctaaaaaatgcacagtgctttaaaaaatgcacagtgatctaaaaaatgcacagtacgctaaaaaatgcacag

SEQ ID NO: 8280 - DNA, 147 bp, synthetic construct
  source 1..147: mol_type = other DNA
ttgtgcatttttttgctttttgtgcatttttttgatctttgtgcatttttttacgctttgtgcatttttttgccgctttgtgcatttttttgctttttgtgcatttttttgatctttgtgcatttttttacgctttgtgcatttttt

SEQ ID NO: 8281 - DNA, 147 bp, synthetic construct
  source 1..147: mol_type = other DNA
aaaaaatgcacaatgctttaaaaaatgcacaatgatctaaaaaatgcacaatacgctaaaaaatgcacaatgccgctaaaaaatgcacaatgctttaaaaaatgcacaatgatctaaaaaatgcacaatacgctaaaaaatgcacaa

SEQ ID NO: 8282 - DNA, 135 bp, synthetic construct
  source 1..135: mol_type = other DNA
ccgaaaccgaaacctgatctccgaaaccgaaacctacgctccgaaaccgaaacctgccgctccgaaaccgaaacctgctttccgaaaccgaaacctgatctccgaaaccgaaacctacgctccgaaaccgaaacc

SEQ ID NO: 8283 - DNA, 135 bp, synthetic construct
  source 1..135: mol_type = other DNA
ggtttcggtttcggtgatctggtttcggtttcggtacgctggtttcggtttcggtgccgctggtttcggtttcggtgctttggtttcggtttcggtgatctggtttcggtttcggtacgctggtttcggtttcgg

SEQ ID NO: 8284 - DNA, 135 bp, synthetic construct
  source 1..135: mol_type = other DNA
ccgaaaccgaaacttgatctccgaaaccgaaacttacgctccgaaaccgaaacttgccgctccgaaaccgaaacttgctttccgaaaccgaaacttgatctccgaaaccgaaacttacgctccgaaaccgaaact

SEQ ID NO: 8285 - DNA, 135 bp, synthetic construct
  source 1..135: mol_type = other DNA
agtttcggtttcggtgatctagtttcggtttcggtacgctagtttcggtttcggtgccgctagtttcggtttcggtgctttagtttcggtttcggtgatctagtttcggtttcggtacgctagtttcggtttcgg

SEQ ID NO: 8286 - DNA, 149 bp, synthetic construct
  source 1..149: mol_type = other DNA
ggtcacgtgagtgccgctggtcacgtgagtgctttggtcacgtgagtgatctggtcacgtgagtacgctggtcacgtgagtgccgctggtcacgtgagtgctttggtcacgtgagtgatctggtcacgtgagtacgctggtcacgtgag

SEQ ID NO: 8287 - DNA, 149 bp, synthetic construct
  source 1..149: mol_type = other DNA
ctcacgtgacctgccgctctcacgtgacctgctttctcacgtgacctgatctctcacgtgacctacgctctcacgtgacctgccgctctcacgtgacctgctttctcacgtgacctgatctctcacgtgacctacgctctcacgtgacc

SEQ ID NO: 8288 - DNA, 149 bp, synthetic construct
  source 1..149: mol_type = other DNA
ggtcacgtgactgccgctggtcacgtgactgctttggtcacgtgactgatctggtcacgtgactacgctggtcacgtgactgccgctggtcacgtgactgctttggtcacgtgactgatctggtcacgtgactacgctggtcacgtgac

SEQ ID NO: 8289 - DNA, 149 bp, synthetic construct
  source 1..149: mol_type = other DNA
gtcacgtgacctgccgctgtcacgtgacctgctttgtcacgtgacctgatctgtcacgtgacctacgctgtcacgtgacctgccgctgtcacgtgacctgctttgtcacgtgacctgatctgtcacgtgacctacgctgtcacgtgacc

SEQ ID NO: 8290 - DNA, 149 bp, synthetic construct
  source 1..149: mol_type = other DNA
ggtcacgtgggtgccgctggtcacgtgggtgctttggtcacgtgggtgatctggtcacgtgggtacgctggtcacgtgggtgccgctggtcacgtgggtgctttggtcacgtgggtgatctggtcacgtgggtacgctggtcacgtggg

SEQ ID NO: 8291 - DNA, 149 bp, synthetic construct
  source 1..149: mol_type = other DNA
cccacgtgacctgccgctcccacgtgacctgctttcccacgtgacctgatctcccacgtgacctacgctcccacgtgacctgccgctcccacgtgacctgctttcccacgtgacctgatctcccacgtgacctacgctcccacgtgacc

SEQ ID NO: 8292 - DNA, 149 bp, synthetic construct
  source 1..149: mol_type = other DNA
ggtcacgtggctgccgctggtcacgtggctgctttggtcacgtggctgatctggtcacgtggctacgctggtcacgtggctgccgctggtcacgtggctgctttggtcacgtggctgatctggtcacgtggctacgctggtcacgtggc

SEQ ID NO: 8293 - DNA, 149 bp, synthetic construct
  source 1..149: mol_type = other DNA
gccacgtgacctgccgctgccacgtgacctgctttgccacgtgacctgatctgccacgtgacctacgctgccacgtgacctgccgctgccacgtgacctgctttgccacgtgacctgatctgccacgtgacctacgctgccacgtgacc

SEQ ID NO: 8294 - DNA, 140 bp, synthetic construct
  source 1..140: mol_type = other DNA
atttcccaggtgccgctatttcccaggtgctttatttcccaggtgatctatttcccaggtacgctatttcccaggtgccgctatttcccaggtgctttatttcccaggtgatctatttcccaggtacgctatttcccagg

SEQ ID NO: 8295 - DNA, 140 bp, synthetic construct
  source 1..140: mol_type = other DNA
cctgggaaattgccgctcctgggaaattgctttcctgggaaattgatctcctgggaaattacgctcctgggaaattgccgctcctgggaaattgctttcctgggaaattgatctcctgggaaattacgctcctgggaaat

SEQ ID NO: 8296 - DNA, 140 bp, synthetic construct
  source 1..140: mol_type = other DNA
atttcccacgtgccgctatttcccacgtgctttatttcccacgtgatctatttcccacgtacgctatttcccacgtgccgctatttcccacgtgctttatttcccacgtgatctatttcccacgtacgctatttcccacg

SEQ ID NO: 8297 - DNA, 140 bp, synthetic construct
  source 1..140: mol_type = other DNA
cgtgggaaattgccgctcgtgggaaattgctttcgtgggaaattgatctcgtgggaaattacgctcgtgggaaattgccgctcgtgggaaattgctttcgtgggaaattgatctcgtgggaaattacgctcgtgggaaat

SEQ ID NO: 8298 - DNA, 140 bp, synthetic construct
  source 1..140: mol_type = other DNA
ctttcccaggtgccgctctttcccaggtgctttctttcccaggtgatctctttcccaggtacgctctttcccaggtgccgctctttcccaggtgctttctttcccaggtgatctctttcccaggtacgctctttcccagg

SEQ ID NO: 8299 - DNA, 140 bp, synthetic construct
  source 1..140: mol_type = other DNA
cctgggaaagtgccgctcctgggaaagtgctttcctgggaaagtgatctcctgggaaagtacgctcctgggaaagtgccgctcctgggaaagtgctttcctgggaaagtgatctcctgggaaagtacgctcctgggaaag

SEQ ID NO: 8300 - DNA, 140 bp, synthetic construct
  source 1..140: mol_type = other DNA
ctttcccacgtgccgctctttcccacgtgctttctttcccacgtgatctctttcccacgtacgctctttcccacgtgccgctctttcccacgtgctttctttcccacgtgatctctttcccacgtacgctctttcccacg

SEQ ID NO: 8301 - DNA, 140 bp, synthetic construct
  source 1..140: mol_type = other DNA
cgtgggaaagtgccgctcgtgggaaagtgctttcgtgggaaagtgatctcgtgggaaagtacgctcgtgggaaagtgccgctcgtgggaaagtgctttcgtgggaaagtgatctcgtgggaaagtacgctcgtgggaaag

SEQ ID NO: 8302 - DNA, 140 bp, synthetic construct
  source 1..140: mol_type = other DNA
ttttcccaggtgccgctttttcccaggtgctttttttcccaggtgatctttttcccaggtacgctttttcccaggtgccgctttttcccaggtgctttttttcccaggtgatctttttcccaggtacgctttttcccagg

SEQ ID NO: 8303 - DNA, 140 bp, synthetic construct
  source 1..140: mol_type = other DNA
cctgggaaaatgccgctcctgggaaaatgctttcctgggaaaatgatctcctgggaaaatacgctcctgggaaaatgccgctcctgggaaaatgctttcctgggaaaatgatctcctgggaaaatacgctcctgggaaaa

SEQ ID NO: 8304 - DNA, 140 bp, synthetic construct
  source 1..140: mol_type = other DNA
ttttcccacgtgccgctttttcccacgtgctttttttcccacgtgatctttttcccacgtacgctttttcccacgtgccgctttttcccacgtgctttttttcccacgtgatctttttcccacgtacgctttttcccacg

SEQ ID NO: 8305 - DNA, 140 bp, synthetic construct
  source 1..140: mol_type = other DNA
cgtgggaaaatgccgctcgtgggaaaatgctttcgtgggaaaatgatctcgtgggaaaatacgctcgtgggaaaatgccgctcgtgggaaaatgctttcgtgggaaaatgatctcgtgggaaaatacgctcgtgggaaaa

SEQ ID NO: 8306 - DNA, 130 bp, synthetic construct
  source 1..130: mol_type = other DNA
gccaattcccatggtgtaaattgccgctgccaattcccatggtgtaaattgctttgccaattcccatggtgtaaattgatctgccaattcccatggtgtaaattacgctgccaattcccatggtgtaaat

SEQ ID NO: 8307 - DNA, 130 bp, synthetic construct
  source 1..130: mol_type = other DNA
atttacaccatgggaattggctgccgctatttacaccatgggaattggctgctttatttacaccatgggaattggctgatctatttacaccatgggaattggctacgctatttacaccatgggaattggc

SEQ ID NO: 8308 - DNA, 130 bp, synthetic construct
  source 1..130: mol_type = other DNA
gccaattcccgtggtgtaaattgccgctgccaattcccgtggtgtaaattgctttgccaattcccgtggtgtaaattgatctgccaattcccgtggtgtaaattacgctgccaattcccgtggtgtaaat

SEQ ID NO: 8309 - DNA, 130 bp, synthetic construct
  source 1..130: mol_type = other DNA
atttacaccacgggaattggctgccgctatttacaccacgggaattggctgctttatttacaccacgggaattggctgatctatttacaccacgggaattggctacgctatttacaccacgggaattggc

SEQ ID NO: 8310 - DNA, 130 bp, synthetic construct
  source 1..130: mol_type = other DNA
gccaattcctatggtgtaaattgccgctgccaattcctatggtgtaaattgctttgccaattcctatggtgtaaattgatctgccaattcctatggtgtaaattacgctgccaattcctatggtgtaaat

SEQ ID NO: 8311 - DNA, 130 bp, synthetic construct
  source 1..130: mol_type = other DNA
atttacaccataggaattggctgccgctatttacaccataggaattggctgctttatttacaccataggaattggctgatctatttacaccataggaattggctacgctatttacaccataggaattggc

SEQ ID NO: 8312 - DNA, 130 bp, synthetic construct
  source 1..130: mol_type = other DNA
gccaattcctgtggtgtaaattgccgctgccaattcctgtggtgtaaattgctttgccaattcctgtggtgtaaattgatctgccaattcctgtggtgtaaattacgctgccaattcctgtggtgtaaat

SEQ ID NO: 8313 - DNA, 130 bp, synthetic construct
  source 1..130: mol_type = other DNA
atttacaccacaggaattggctgccgctatttacaccacaggaattggctgctttatttacaccacaggaattggctgatctatttacaccacaggaattggctacgctatttacaccacaggaattggc

SEQ ID NO: 8314 - DNA, 130 bp, synthetic construct
  source 1..130: mol_type = other DNA
gccaatttccatggtgtaaattgccgctgccaatttccatggtgtaaattgctttgccaatttccatggtgtaaattgatctgccaatttccatggtgtaaattacgctgccaatttccatggtgtaaat

SEQ ID NO: 8315 - DNA, 130 bp, synthetic construct
  source 1..130: mol_type = other DNA
atttacaccatggaaattggctgccgctatttacaccatggaaattggctgctttatttacaccatggaaattggctgatctatttacaccatggaaattggctacgctatttacaccatggaaattggc

SEQ ID NO: 8316 - DNA, 130 bp, synthetic construct
  source 1..130: mol_type = other DNA
gccaatttccgtggtgtaaattgccgctgccaatttccgtggtgtaaattgctttgccaatttccgtggtgtaaattgatctgccaatttccgtggtgtaaattacgctgccaatttccgtggtgtaaat

SEQ ID NO: 8317 - DNA, 130 bp, synthetic construct
  source 1..130: mol_type = other DNA
atttacaccacggaaattggctgccgctatttacaccacggaaattggctgctttatttacaccacggaaattggctgatctatttacaccacggaaattggctacgctatttacaccacggaaattggc

SEQ ID NO: 8318 - DNA, 130 bp, synthetic construct
  source 1..130: mol_type = other DNA
gccaatttctatggtgtaaattgccgctgccaatttctatggtgtaaattgctttgccaatttctatggtgtaaattgatctgccaatttctatggtgtaaattacgctgccaatttctatggtgtaaat

SEQ ID NO: 8319 - DNA, 130 bp, synthetic construct
  source 1..130: mol_type = other DNA
atttacaccatagaaattggctgccgctatttacaccatagaaattggctgctttatttacaccatagaaattggctgatctatttacaccatagaaattggctacgctatttacaccatagaaattggc

SEQ ID NO: 8320 - DNA, 130 bp, synthetic construct
  source 1..130: mol_type = other DNA
gccaatttctgtggtgtaaattgccgctgccaatttctgtggtgtaaattgctttgccaatttctgtggtgtaaattgatctgccaatttctgtggtgtaaattacgctgccaatttctgtggtgtaaat

SEQ ID NO: 8321 - DNA, 130 bp, synthetic construct
  source 1..130: mol_type = other DNA
atttacaccacagaaattggctgccgctatttacaccacagaaattggctgctttatttacaccacagaaattggctgatctatttacaccacagaaattggctacgctatttacaccacagaaattggc

SEQ ID NO: 8322 - DNA, 139 bp, synthetic construct
  source 1..139: mol_type = other DNA
agtttcagtttctgctttagtttcagtttctgatctagtttcagtttctacgctagtttcagtttctgccgctagtttcagtttctgctttagtttcagtttctgatctagtttcagtttctacgctagtttcagtttc

SEQ ID NO: 8323 - DNA, 139 bp, synthetic construct
  source 1..139: mol_type = other DNA
gaaactgaaacttgctttgaaactgaaacttgatctgaaactgaaacttacgctgaaactgaaacttgccgctgaaactgaaacttgctttgaaactgaaacttgatctgaaactgaaacttacgctgaaactgaaact

SEQ ID NO: 8324 - DNA, 139 bp, synthetic construct
  source 1..139: mol_type = other DNA
agtttcattttctgctttagtttcattttctgatctagtttcattttctacgctagtttcattttctgccgctagtttcattttctgctttagtttcattttctgatctagtttcattttctacgctagtttcattttc

SEQ ID NO: 8325 - DNA, 139 bp, synthetic construct
  source 1..139: mol_type = other DNA
gaaaatgaaacttgctttgaaaatgaaacttgatctgaaaatgaaacttacgctgaaaatgaaacttgccgctgaaaatgaaacttgctttgaaaatgaaacttgatctgaaaatgaaacttacgctgaaaatgaaact

SEQ ID NO: 8326 - DNA, 136 bp, synthetic construct
  source 1..136: mol_type = other DNA
aacagctgtacgctaacagctgtgccgctaacagctgtgctttaacagctgtgatctaacagctgtacgctaacagctgtgccgctaacagctgtgctttaacagctgtgatctaacagctgtacgctaacagctg

SEQ ID NO: 8327 - DNA, 136 bp, synthetic construct
  source 1..136: mol_type = other DNA
cagctgtttacgctcagctgtttgccgctcagctgtttgctttcagctgtttgatctcagctgtttacgctcagctgtttgccgctcagctgtttgctttcagctgtttgatctcagctgtttacgctcagctgtt

SEQ ID NO: 8328 - DNA, 139 bp, synthetic construct
  source 1..139: mol_type = other DNA
agggggcggggctgctttagggggcggggctgatctagggggcggggctacgctagggggcggggctgccgctagggggcggggctgctttagggggcggggctgatctagggggcggggctacgctagggggcggggc

SEQ ID NO: 8329 - DNA, 139 bp, synthetic construct
  source 1..139: mol_type = other DNA
gccccgcccccttgctttgccccgcccccttgatctgccccgcccccttacgctgccccgcccccttgccgctgccccgcccccttgctttgccccgcccccttgatctgccccgcccccttacgctgccccgccccct

SEQ ID NO: 8330 - DNA, 139 bp, synthetic construct
  source 1..139: mol_type = other DNA
agggggcgtggctgctttagggggcgtggctgatctagggggcgtggctacgctagggggcgtggctgccgctagggggcgtggctgctttagggggcgtggctgatctagggggcgtggctacgctagggggcgtggc

SEQ ID NO: 8331 - DNA, 139 bp, synthetic construct
  source 1..139: mol_type = other DNA
gccacgcccccttgctttgccacgcccccttgatctgccacgcccccttacgctgccacgcccccttgccgctgccacgcccccttgctttgccacgcccccttgatctgccacgcccccttacgctgccacgccccct

SEQ ID NO: 8332 - DNA, 139 bp, synthetic construct
  source 1..139: mol_type = other DNA
agtgggcggggctgctttagtgggcggggctgatctagtgggcggggctacgctagtgggcggggctgccgctagtgggcggggctgctttagtgggcggggctgatctagtgggcggggctacgctagtgggcggggc

SEQ ID NO: 8333 - DNA, 139 bp, synthetic construct
  source 1..139: mol_type = other DNA
gccccgcccacttgctttgccccgcccacttgatctgccccgcccacttacgctgccccgcccacttgccgctgccccgcccacttgctttgccccgcccacttgatctgccccgcccacttacgctgccccgcccact

SEQ ID NO: 8334 - DNA, 139 bp, synthetic construct
  source 1..139: mol_type = other DNA
agtgggcgtggctgctttagtgggcgtggctgatctagtgggcgtggctacgctagtgggcgtggctgccgctagtgggcgtggctgctttagtgggcgtggctgatctagtgggcgtggctacgctagtgggcgtggc

SEQ ID NO: 8335 - DNA, 139 bp, synthetic construct
  source 1..139: mol_type = other DNA
gccacgcccacttgctttgccacgcccacttgatctgccacgcccacttacgctgccacgcccacttgccgctgccacgcccacttgctttgccacgcccacttgatctgccacgcccacttacgctgccacgcccact

SEQ ID NO: 8336 - DNA, 139 bp, synthetic construct
  source 1..139: mol_type = other DNA
ggggggcggggctgctttggggggcggggctgatctggggggcggggctacgctggggggcggggctgccgctggggggcggggctgctttggggggcggggctgatctggggggcggggctacgctggggggcggggc

SEQ ID NO: 8337 - DNA, 139 bp, synthetic construct
  source 1..139: mol_type = other DNA
gccccgcccccctgctttgccccgcccccctgatctgccccgcccccctacgctgccccgcccccctgccgctgccccgcccccctgctttgccccgcccccctgatctgccccgcccccctacgctgccccgcccccc

SEQ ID NO: 8338 - DNA, 139 bp, synthetic construct
  source 1..139: mol_type = other DNA
ggggggcgtggctgctttggggggcgtggctgatctggggggcgtggctacgctggggggcgtggctgccgctggggggcgtggctgctttggggggcgtggctgatctggggggcgtggctacgctggggggcgtggc

SEQ ID NO: 8339 - DNA, 139 bp, synthetic construct
  source 1..139: mol_type = other DNA
gccacgcccccctgctttgccacgcccccctgatctgccacgcccccctacgctgccacgcccccctgccgctgccacgcccccctgctttgccacgcccccctgatctgccacgcccccctacgctgccacgcccccc

SEQ ID NO: 8340 - DNA, 139 bp, synthetic construct
  source 1..139: mol_type = other DNA
ggtgggcggggctgctttggtgggcggggctgatctggtgggcggggctacgctggtgggcggggctgccgctggtgggcggggctgctttggtgggcggggctgatctggtgggcggggctacgctggtgggcggggc

SEQ ID NO: 8341 - DNA, 139 bp, synthetic construct
  source 1..139: mol_type = other DNA
gccccgcccacctgctttgccccgcccacctgatctgccccgcccacctacgctgccccgcccacctgccgctgccccgcccacctgctttgccccgcccacctgatctgccccgcccacctacgctgccccgcccacc

SEQ ID NO: 8342 - DNA, 139 bp, synthetic construct
  source 1..139: mol_type = other DNA
ggtgggcgtggctgctttggtgggcgtggctgatctggtgggcgtggctacgctggtgggcgtggctgccgctggtgggcgtggctgctttggtgggcgtggctgatctggtgggcgtggctacgctggtgggcgtggc

SEQ ID NO: 8343 - DNA, 139 bp, synthetic construct
  source 1..139: mol_type = other DNA
gccacgcccacctgctttgccacgcccacctgatctgccacgcccacctacgctgccacgcccacctgccgctgccacgcccacctgctttgccacgcccacctgatctgccacgcccacctacgctgccacgcccacc

SEQ ID NO: 8344 - DNA, 136 bp, synthetic construct
  source 1..136: mol_type = other DNA
ctgacaactacgctctgacaactgccgctctgacaactgctttctgacaactgatctctgacaactacgctctgacaactgccgctctgacaactgctttctgacaactgatctctgacaactacgctctgacaac

SEQ ID NO: 8345 - DNA, 136 bp, synthetic construct
  source 1..136: mol_type = other DNA
gttgtcagtacgctgttgtcagtgccgctgttgtcagtgctttgttgtcagtgatctgttgtcagtacgctgttgtcagtgccgctgttgtcagtgctttgttgtcagtgatctgttgtcagtacgctgttgtcag

SEQ ID NO: 8346 - DNA, 136 bp, synthetic construct
  source 1..136: mol_type = other DNA
ctgacaattacgctctgacaattgccgctctgacaattgctttctgacaattgatctctgacaattacgctctgacaattgccgctctgacaattgctttctgacaattgatctctgacaattacgctctgacaat

SEQ ID NO: 8347 - DNA, 136 bp, synthetic construct
  source 1..136: mol_type = other DNA
attgtcagtacgctattgtcagtgccgctattgtcagtgctttattgtcagtgatctattgtcagtacgctattgtcagtgccgctattgtcagtgctttattgtcagtgatctattgtcagtacgctattgtcag

SEQ ID NO: 8348 - DNA, 136 bp, synthetic construct
  source 1..136: mol_type = other DNA
ctgacagctacgctctgacagctgccgctctgacagctgctttctgacagctgatctctgacagctacgctctgacagctgccgctctgacagctgctttctgacagctgatctctgacagctacgctctgacagc

SEQ ID NO: 8349 - DNA, 136 bp, synthetic construct
  source 1..136: mol_type = other DNA
gctgtcagtacgctgctgtcagtgccgctgctgtcagtgctttgctgtcagtgatctgctgtcagtacgctgctgtcagtgccgctgctgtcagtgctttgctgtcagtgatctgctgtcagtacgctgctgtcag

SEQ ID NO: 8350 - DNA, 136 bp, synthetic construct
  source 1..136: mol_type = other DNA
ctgacagttacgctctgacagttgccgctctgacagttgctttctgacagttgatctctgacagttacgctctgacagttgccgctctgacagttgctttctgacagttgatctctgacagttacgctctgacagt

SEQ ID NO: 8351 - DNA, 136 bp, synthetic construct
  source 1..136: mol_type = other DNA
actgtcagtacgctactgtcagtgccgctactgtcagtgctttactgtcagtgatctactgtcagtacgctactgtcagtgccgctactgtcagtgctttactgtcagtgatctactgtcagtacgctactgtcag

SEQ ID NO: 8352 - DNA, 136 bp, synthetic construct
  source 1..136: mol_type = other DNA
ctgacatctacgctctgacatctgccgctctgacatctgctttctgacatctgatctctgacatctacgctctgacatctgccgctctgacatctgctttctgacatctgatctctgacatctacgctctgacatc

SEQ ID NO: 8353 - DNA, 136 bp, synthetic construct
  source 1..136: mol_type = other DNA
gatgtcagtacgctgatgtcagtgccgctgatgtcagtgctttgatgtcagtgatctgatgtcagtacgctgatgtcagtgccgctgatgtcagtgctttgatgtcagtgatctgatgtcagtacgctgatgtcag

SEQ ID NO: 8354 - DNA, 136 bp, synthetic construct
  source 1..136: mol_type = other DNA
ctgacatttacgctctgacatttgccgctctgacatttgctttctgacatttgatctctgacatttacgctctgacatttgccgctctgacatttgctttctgacatttgatctctgacatttacgctctgacatt

SEQ ID NO: 8355 - DNA, 136 bp, synthetic construct
  source 1..136: mol_type = other DNA
aatgtcagtacgctaatgtcagtgccgctaatgtcagtgctttaatgtcagtgatctaatgtcagtacgctaatgtcagtgccgctaatgtcagtgctttaatgtcagtgatctaatgtcagtacgctaatgtcag

SEQ ID NO: 8356 - DNA, 136 bp, synthetic construct
  source 1..136: mol_type = other DNA
ctgtcaactacgctctgtcaactgccgctctgtcaactgctttctgtcaactgatctctgtcaactacgctctgtcaactgccgctctgtcaactgctttctgtcaactgatctctgtcaactacgctctgtcaac

SEQ ID NO: 8357 - DNA, 136 bp, synthetic construct
  source 1..136: mol_type = other DNA
gttgacagtacgctgttgacagtgccgctgttgacagtgctttgttgacagtgatctgttgacagtacgctgttgacagtgccgctgttgacagtgctttgttgacagtgatctgttgacagtacgctgttgacag

SEQ ID NO: 8358 - DNA, 136 bp, synthetic construct
  source 1..136: mol_type = other DNA
ctgtcaattacgctctgtcaattgccgctctgtcaattgctttctgtcaattgatctctgtcaattacgctctgtcaattgccgctctgtcaattgctttctgtcaattgatctctgtcaattacgctctgtcaat

SEQ ID NO: 8359 - DNA, 136 bp, synthetic construct
  source 1..136: mol_type = other DNA
attgacagtacgctattgacagtgccgctattgacagtgctttattgacagtgatctattgacagtacgctattgacagtgccgctattgacagtgctttattgacagtgatctattgacagtacgctattgacag

SEQ ID NO: 8360 - DNA, 136 bp, synthetic construct
  source 1..136: mol_type = other DNA
ctgtcagctacgctctgtcagctgccgctctgtcagctgctttctgtcagctgatctctgtcagctacgctctgtcagctgccgctctgtcagctgctttctgtcagctgatctctgtcagctacgctctgtcagc

SEQ ID NO: 8361 - DNA, 136 bp, synthetic construct
  source 1..136: mol_type = other DNA
gctgacagtacgctgctgacagtgccgctgctgacagtgctttgctgacagtgatctgctgacagtacgctgctgacagtgccgctgctgacagtgctttgctgacagtgatctgctgacagtacgctgctgacag

SEQ ID NO: 8362 - DNA, 136 bp, synthetic construct
  source 1..136: mol_type = other DNA
ctgtcagttacgctctgtcagttgccgctctgtcagttgctttctgtcagttgatctctgtcagttacgctctgtcagttgccgctctgtcagttgctttctgtcagttgatctctgtcagttacgctctgtcagt

SEQ ID NO: 8363 - DNA, 136 bp, synthetic construct
  source 1..136: mol_type = other DNA
actgacagtacgctactgacagtgccgctactgacagtgctttactgacagtgatctactgacagtacgctactgacagtgccgctactgacagtgctttactgacagtgatctactgacagtacgctactgacag

SEQ ID NO: 8364 - DNA, 136 bp, synthetic construct
  source 1..136: mol_type = other DNA
ctgtcatctacgctctgtcatctgccgctctgtcatctgctttctgtcatctgatctctgtcatctacgctctgtcatctgccgctctgtcatctgctttctgtcatctgatctctgtcatctacgctctgtcatc

SEQ ID NO: 8365 - DNA, 136 bp, synthetic construct
  source 1..136: mol_type = other DNA
gatgacagtacgctgatgacagtgccgctgatgacagtgctttgatgacagtgatctgatgacagtacgctgatgacagtgccgctgatgacagtgctttgatgacagtgatctgatgacagtacgctgatgacag

SEQ ID NO: 8366 - DNA, 136 bp, synthetic construct
  source 1..136: mol_type = other DNA
ctgtcatttacgctctgtcatttgccgctctgtcatttgctttctgtcatttgatctctgtcatttacgctctgtcatttgccgctctgtcatttgctttctgtcatttgatctctgtcatttacgctctgtcatt

SEQ ID NO: 8367 - DNA, 136 bp, synthetic construct
  source 1..136: mol_type = other DNA
aatgacagtacgctaatgacagtgccgctaatgacagtgctttaatgacagtgatctaatgacagtacgctaatgacagtgccgctaatgacagtgctttaatgacagtgatctaatgacagtacgctaatgacag

SEQ ID NO: 8368 - DNA, 136 bp, synthetic construct
  source 1..136: mol_type = other DNA
ttgacaactacgctttgacaactgccgctttgacaactgctttttgacaactgatctttgacaactacgctttgacaactgccgctttgacaactgctttttgacaactgatctttgacaactacgctttgacaac

SEQ ID NO: 8369 - DNA, 136 bp, synthetic construct
  source 1..136: mol_type = other DNA
gttgtcaatacgctgttgtcaatgccgctgttgtcaatgctttgttgtcaatgatctgttgtcaatacgctgttgtcaatgccgctgttgtcaatgctttgttgtcaatgatctgttgtcaatacgctgttgtcaa

SEQ ID NO: 8370 - DNA, 136 bp, synthetic construct
  source 1..136: mol_type = other DNA
ttgacaattacgctttgacaattgccgctttgacaattgctttttgacaattgatctttgacaattacgctttgacaattgccgctttgacaattgctttttgacaattgatctttgacaattacgctttgacaat

SEQ ID NO: 8371 - DNA, 136 bp, synthetic construct
  source 1..136: mol_type = other DNA
attgtcaatacgctattgtcaatgccgctattgtcaatgctttattgtcaatgatctattgtcaatacgctattgtcaatgccgctattgtcaatgctttattgtcaatgatctattgtcaatacgctattgtcaa

SEQ ID NO: 8372 - DNA, 136 bp, synthetic construct
  source 1..136: mol_type = other DNA
ttgacagctacgctttgacagctgccgctttgacagctgctttttgacagctgatctttgacagctacgctttgacagctgccgctttgacagctgctttttgacagctgatctttgacagctacgctttgacagc

SEQ ID NO: 8373 - DNA, 136 bp, synthetic construct
  source 1..136: mol_type = other DNA
gctgtcaatacgctgctgtcaatgccgctgctgtcaatgctttgctgtcaatgatctgctgtcaatacgctgctgtcaatgccgctgctgtcaatgctttgctgtcaatgatctgctgtcaatacgctgctgtcaa

SEQ ID NO: 8374 - DNA, 136 bp, synthetic construct
  source 1..136: mol_type = other DNA
ttgacagttacgctttgacagttgccgctttgacagttgctttttgacagttgatctttgacagttacgctttgacagttgccgctttgacagttgctttttgacagttgatctttgacagttacgctttgacagt

SEQ ID NO: 8375 - DNA, 136 bp, synthetic construct
  source 1..136: mol_type = other DNA
actgtcaatacgctactgtcaatgccgctactgtcaatgctttactgtcaatgatctactgtcaatacgctactgtcaatgccgctactgtcaatgctttactgtcaatgatctactgtcaatacgctactgtcaa

SEQ ID NO: 8376 - DNA, 136 bp, synthetic construct
  source 1..136: mol_type = other DNA
ttgacatctacgctttgacatctgccgctttgacatctgctttttgacatctgatctttgacatctacgctttgacatctgccgctttgacatctgctttttgacatctgatctttgacatctacgctttgacatc

SEQ ID NO: 8377 - DNA, 136 bp, synthetic construct
  source 1..136: mol_type = other DNA
gatgtcaatacgctgatgtcaatgccgctgatgtcaatgctttgatgtcaatgatctgatgtcaatacgctgatgtcaatgccgctgatgtcaatgctttgatgtcaatgatctgatgtcaatacgctgatgtcaa

SEQ ID NO: 8378 - DNA, 136 bp, synthetic construct
  source 1..136: mol_type = other DNA
ttgacatttacgctttgacatttgccgctttgacatttgctttttgacatttgatctttgacatttacgctttgacatttgccgctttgacatttgctttttgacatttgatctttgacatttacgctttgacatt

SEQ ID NO: 8379 - DNA, 136 bp, synthetic construct
  source 1..136: mol_type = other DNA
aatgtcaatacgctaatgtcaatgccgctaatgtcaatgctttaatgtcaatgatctaatgtcaatacgctaatgtcaatgccgctaatgtcaatgctttaatgtcaatgatctaatgtcaatacgctaatgtcaa

SEQ ID NO: 8380 - DNA, 136 bp, synthetic construct
  source 1..136: mol_type = other DNA
ttgtcaactacgctttgtcaactgccgctttgtcaactgctttttgtcaactgatctttgtcaactacgctttgtcaactgccgctttgtcaactgctttttgtcaactgatctttgtcaactacgctttgtcaac

SEQ ID NO: 8381 - DNA, 136 bp, synthetic construct
  source 1..136: mol_type = other DNA
gttgacaatacgctgttgacaatgccgctgttgacaatgctttgttgacaatgatctgttgacaatacgctgttgacaatgccgctgttgacaatgctttgttgacaatgatctgttgacaatacgctgttgacaa

SEQ ID NO: 8382 - DNA, 136 bp, synthetic construct
  source 1..136: mol_type = other DNA
ttgtcaattacgctttgtcaattgccgctttgtcaattgctttttgtcaattgatctttgtcaattacgctttgtcaattgccgctttgtcaattgctttttgtcaattgatctttgtcaattacgctttgtcaat

SEQ ID NO: 8383 - DNA, 136 bp, synthetic construct
  source 1..136: mol_type = other DNA
attgacaatacgctattgacaatgccgctattgacaatgctttattgacaatgatctattgacaatacgctattgacaatgccgctattgacaatgctttattgacaatgatctattgacaatacgctattgacaa

SEQ ID NO: 8384 - DNA, 136 bp, synthetic construct
  source 1..136: mol_type = other DNA
ttgtcagctacgctttgtcagctgccgctttgtcagctgctttttgtcagctgatctttgtcagctacgctttgtcagctgccgctttgtcagctgctttttgtcagctgatctttgtcagctacgctttgtcagc

SEQ ID NO: 8385 - DNA, 136 bp, synthetic construct
  source 1..136: mol_type = other DNA
gctgacaatacgctgctgacaatgccgctgctgacaatgctttgctgacaatgatctgctgacaatacgctgctgacaatgccgctgctgacaatgctttgctgacaatgatctgctgacaatacgctgctgacaa

SEQ ID NO: 8386 - DNA, 136 bp, synthetic construct
  source 1..136: mol_type = other DNA
ttgtcagttacgctttgtcagttgccgctttgtcagttgctttttgtcagttgatctttgtcagttacgctttgtcagttgccgctttgtcagttgctttttgtcagttgatctttgtcagttacgctttgtcagt

SEQ ID NO: 8387 - DNA, 136 bp, synthetic construct
  source 1..136: mol_type = other DNA
actgacaatacgctactgacaatgccgctactgacaatgctttactgacaatgatctactgacaatacgctactgacaatgccgctactgacaatgctttactgacaatgatctactgacaatacgctactgacaa

SEQ ID NO: 8388 - DNA, 136 bp, synthetic construct
  source 1..136: mol_type = other DNA
ttgtcatctacgctttgtcatctgccgctttgtcatctgctttttgtcatctgatctttgtcatctacgctttgtcatctgccgctttgtcatctgctttttgtcatctgatctttgtcatctacgctttgtcatc

SEQ ID NO: 8389 - DNA, 136 bp, synthetic construct
  source 1..136: mol_type = other DNA
gatgacaatacgctgatgacaatgccgctgatgacaatgctttgatgacaatgatctgatgacaatacgctgatgacaatgccgctgatgacaatgctttgatgacaatgatctgatgacaatacgctgatgacaa

SEQ ID NO: 8390 - DNA, 136 bp, synthetic construct
  source 1..136: mol_type = other DNA
ttgtcatttacgctttgtcatttgccgctttgtcatttgctttttgtcatttgatctttgtcatttacgctttgtcatttgccgctttgtcatttgctttttgtcatttgatctttgtcatttacgctttgtcatt

SEQ ID NO: 8391 - DNA, 136 bp, synthetic construct
  source 1..136: mol_type = other DNA
aatgacaatacgctaatgacaatgccgctaatgacaatgctttaatgacaatgatctaatgacaatacgctaatgacaatgccgctaatgacaatgctttaatgacaatgatctaatgacaatacgctaatgacaa

SEQ ID NO: 8392 - DNA, 140 bp, synthetic construct; identical to SEQ ID NO: 6450
  source 1..140: mol_type = other DNA

SEQ ID NO: 8393 - DNA, 140 bp, synthetic construct; identical to SEQ ID NO: 6451
  source 1..140: mol_type = other DNA

SEQ ID NO: 8394 - DNA, 140 bp, synthetic construct; identical to SEQ ID NO: 6452
  source 1..140: mol_type = other DNA

SEQ ID NO: 8395 - DNA, 140 bp, synthetic construct; identical to SEQ ID NO: 6453
  source 1..140: mol_type = other DNA

SEQ ID NO: 8396 - DNA, 146 bp, synthetic construct
  source 1..146: mol_type = other DNA
ccggaagcgtacgctccggaagcgtgccgctccggaagcgtgctttccggaagcgtgatctccggaagcgtacgctccggaagcgtgccgctccggaagcgtgctttccggaagcgtgatctccggaagcgtacgctccggaagcg

SEQ ID NO: 8397 - DNA, 146 bp, synthetic construct
  source 1..146: mol_type = other DNA
cgcttccggtacgctcgcttccggtgccgctcgcttccggtgctttcgcttccggtgatctcgcttccggtacgctcgcttccggtgccgctcgcttccggtgctttcgcttccggtgatctcgcttccggtacgctcgcttccgg

SEQ ID NO: 8398 - DNA, 146 bp, synthetic construct
  source 1..146: mol_type = other DNA
ccggaagtgtacgctccggaagtgtgccgctccggaagtgtgctttccggaagtgtgatctccggaagtgtacgctccggaagtgtgccgctccggaagtgtgctttccggaagtgtgatctccggaagtgtacgctccggaagtg

SEQ ID NO: 8399 - DNA, 146 bp, synthetic construct
  source 1..146: mol_type = other DNA
cacttccggtacgctcacttccggtgccgctcacttccggtgctttcacttccggtgatctcacttccggtacgctcacttccggtgccgctcacttccggtgctttcacttccggtgatctcacttccggtacgctcacttccgg

SEQ ID NO: 8400 - DNA, 139 bp, synthetic construct
  source 1..139: mol_type = other DNA
aggggcgtggcctgctttaggggcgtggcctgatctaggggcgtggcctacgctaggggcgtggcctgccgctaggggcgtggcctgctttaggggcgtggcctgatctaggggcgtggcctacgctaggggcgtggcc

SEQ ID NO: 8401 - DNA, 139 bp, synthetic construct
  source 1..139: mol_type = other DNA
ggccacgccccttgctttggccacgccccttgatctggccacgccccttacgctggccacgccccttgccgctggccacgccccttgctttggccacgccccttgatctggccacgccccttacgctggccacgcccct

SEQ ID NO: 8402 - DNA, 139 bp, synthetic construct
  source 1..139: mol_type = other DNA
aggggtgtggcctgctttaggggtgtggcctgatctaggggtgtggcctacgctaggggtgtggcctgccgctaggggtgtggcctgctttaggggtgtggcctgatctaggggtgtggcctacgctaggggtgtggcc

SEQ ID NO: 8403 - DNA, 139 bp, synthetic construct
  source 1..139: mol_type = other DNA
ggccacaccccttgctttggccacaccccttgatctggccacaccccttacgctggccacaccccttgccgctggccacaccccttgctttggccacaccccttgatctggccacaccccttacgctggccacacccct

SEQ ID NO: 8404 - DNA, 139 bp, synthetic construct
  source 1..139: mol_type = other DNA
atgggcgtggcctgctttatgggcgtggcctgatctatgggcgtggcctacgctatgggcgtggcctgccgctatgggcgtggcctgctttatgggcgtggcctgatctatgggcgtggcctacgctatgggcgtggcc

SEQ ID NO: 8405 - DNA, 139 bp, synthetic construct
  source 1..139: mol_type = other DNA
ggccacgcccattgctttggccacgcccattgatctggccacgcccattacgctggccacgcccattgccgctggccacgcccattgctttggccacgcccattgatctggccacgcccattacgctggccacgcccat

SEQ ID NO: 8406 - DNA, 139 bp, synthetic construct
  source 1..139: mol_type = other DNA
atgggtgtggcctgctttatgggtgtggcctgatctatgggtgtggcctacgctatgggtgtggcctgccgctatgggtgtggcctgctttatgggtgtggcctgatctatgggtgtggcctacgctatgggtgtggcc

SEQ ID NO: 8407 - DNA, 139 bp, synthetic construct
  source 1..139: mol_type = other DNA
ggccacacccattgctttggccacacccattgatctggccacacccattacgctggccacacccattgccgctggccacacccattgctttggccacacccattgatctggccacacccattacgctggccacacccat

SEQ ID NO: 8408 - DNA, 139 bp, synthetic construct
  source 1..139: mol_type = other DNA
cggggcgtggcctgctttcggggcgtggcctgatctcggggcgtggcctacgctcggggcgtggcctgccgctcggggcgtggcctgctttcggggcgtggcctgatctcggggcgtggcctacgctcggggcgtggcc

SEQ ID NO: 8409 - DNA, 139 bp, synthetic construct
  source 1..139: mol_type = other DNA
ggccacgccccgtgctttggccacgccccgtgatctggccacgccccgtacgctggccacgccccgtgccgctggccacgccccgtgctttggccacgccccgtgatctggccacgccccgtacgctggccacgccccg

SEQ ID NO: 8410 - DNA, 139 bp, synthetic construct
  source 1..139: mol_type = other DNA
cggggtgtggcctgctttcggggtgtggcctgatctcggggtgtggcctacgctcggggtgtggcctgccgctcggggtgtggcctgctttcggggtgtggcctgatctcggggtgtggcctacgctcggggtgtggcc

SEQ ID NO: 8411 - DNA, 139 bp, synthetic construct
  source 1..139: mol_type = other DNA
ggccacaccccgtgctttggccacaccccgtgatctggccacaccccgtacgctggccacaccccgtgccgctggccacaccccgtgctttggccacaccccgtgatctggccacaccccgtacgctggccacaccccg

SEQ ID NO: 8412 - DNA, 139 bp, synthetic construct
  source 1..139: mol_type = other DNA
ctgggcgtggcctgctttctgggcgtggcctgatctctgggcgtggcctacgctctgggcgtggcctgccgctctgggcgtggcctgctttctgggcgtggcctgatctctgggcgtggcctacgctctgggcgtggcc

SEQ ID NO: 8413 - DNA, 139 bp, synthetic construct
  source 1..139: mol_type = other DNA
ggccacgcccagtgctttggccacgcccagtgatctggccacgcccagtacgctggccacgcccagtgccgctggccacgcccagtgctttggccacgcccagtgatctggccacgcccagtacgctggccacgcccag

SEQ ID NO: 8414 - DNA, 139 bp, synthetic construct
  source 1..139: mol_type = other DNA
ctgggtgtggcctgctttctgggtgtggcctgatctctgggtgtggcctacgctctgggtgtggcctgccgctctgggtgtggcctgctttctgggtgtggcctgatctctgggtgtggcctacgctctgggtgtggcc

SEQ ID NO: 8415 - DNA, 139 bp, synthetic construct
  source 1..139: mol_type = other DNA
ggccacacccagtgctttggccacacccagtgatctggccacacccagtacgctggccacacccagtgccgctggccacacccagtgctttggccacacccagtgatctggccacacccagtacgctggccacacccag

SEQ ID NO: 8416 - DNA, 140 bp, synthetic construct
  source 1..140: mol_type = other DNA
atcatgtgactgccgctatcatgtgactgctttatcatgtgactgatctatcatgtgactacgctatcatgtgactgccgctatcatgtgactgctttatcatgtgactgatctatcatgtgactacgctatcatgtgac

SEQ ID NO: 8417 - DNA, 140 bp, synthetic construct
  source 1..140: mol_type = other DNA
gtcacatgattgccgctgtcacatgattgctttgtcacatgattgatctgtcacatgattacgctgtcacatgattgccgctgtcacatgattgctttgtcacatgattgatctgtcacatgattacgctgtcacatgat

SEQ ID NO: 8418 - DNA, 140 bp, synthetic construct
  source 1..140: mol_type = other DNA
gtcatgtgactgccgctgtcatgtgactgctttgtcatgtgactgatctgtcatgtgactacgctgtcatgtgactgccgctgtcatgtgactgctttgtcatgtgactgatctgtcatgtgactacgctgtcatgtgac

SEQ ID NO: 8419 - DNA, 140 bp, synthetic construct
  source 1..140: mol_type = other DNA
gtcacatgactgccgctgtcacatgactgctttgtcacatgactgatctgtcacatgactacgctgtcacatgactgccgctgtcacatgactgctttgtcacatgactgatctgtcacatgactacgctgtcacatgac

SEQ ID NO: 8420 - DNA, 139 bp, synthetic construct
  source 1..139: mol_type = other DNA
caattccgctcatgctttcaattccgctcatgatctcaattccgctcatacgctcaattccgctcatgccgctcaattccgctcatgctttcaattccgctcatgatctcaattccgctcatacgctcaattccgctca

SEQ ID NO: 8421 - DNA, 139 bp, synthetic construct
  source 1..139: mol_type = other DNA
tgagcggaattgtgcttttgagcggaattgtgatcttgagcggaattgtacgcttgagcggaattgtgccgcttgagcggaattgtgcttttgagcggaattgtgatcttgagcggaattgtacgcttgagcggaattg

SEQ ID NO: 8422 - DNA, 139 bp, synthetic construct
  source 1..139: mol_type = other DNA
caattccgctcctgctttcaattccgctcctgatctcaattccgctcctacgctcaattccgctcctgccgctcaattccgctcctgctttcaattccgctcctgatctcaattccgctcctacgctcaattccgctcc

SEQ ID NO: 8423 - DNA, 139 bp, synthetic construct
  source 1..139: mol_type = other DNA
ggagcggaattgtgctttggagcggaattgtgatctggagcggaattgtacgctggagcggaattgtgccgctggagcggaattgtgctttggagcggaattgtgatctggagcggaattgtacgctggagcggaattg

SEQ ID NO: 8424 - DNA, 140 bp, synthetic construct
  source 1..140: mol_type = other DNA
aagcggaagttgccgctaagcggaagttgctttaagcggaagttgatctaagcggaagttacgctaagcggaagttgccgctaagcggaagttgctttaagcggaagttgatctaagcggaagttacgctaagcggaagt

SEQ ID NO: 8425 - DNA, 140 bp, synthetic construct
  source 1..140: mol_type = other DNA
acttccgctttgccgctacttccgctttgctttacttccgctttgatctacttccgctttacgctacttccgctttgccgctacttccgctttgctttacttccgctttgatctacttccgctttacgctacttccgctt

SEQ ID NO: 8426 - DNA, 140 bp, synthetic construct
  source 1..140: mol_type = other DNA
aaccggaagttgccgctaaccggaagttgctttaaccggaagttgatctaaccggaagttacgctaaccggaagttgccgctaaccggaagttgctttaaccggaagttgatctaaccggaagttacgctaaccggaagt

SEQ ID NO: 8427 - DNA, 140 bp, synthetic construct
  source 1..140: mol_type = other DNA
acttccggtttgccgctacttccggtttgctttacttccggtttgatctacttccggtttacgctacttccggtttgccgctacttccggtttgctttacttccggtttgatctacttccggtttacgctacttccggtt

SEQ ID NO: 8428 - DNA, 142 bp, synthetic construct
  source 1..142: mol_type = other DNA
atagggcaaaggtcatgatctatagggcaaaggtcatacgctatagggcaaaggtcatgccgctatagggcaaaggtcatgctttatagggcaaaggtcatgatctatagggcaaaggtcatacgctatagggcaaaggtca

SEQ ID NO: 8429 - DNA, 142 bp, synthetic construct
  source 1..142: mol_type = other DNA
tgacctttgccctattgatcttgacctttgccctattacgcttgacctttgccctattgccgcttgacctttgccctattgcttttgacctttgccctattgatcttgacctttgccctattacgcttgacctttgccctat

SEQ ID NO: 8430 - DNA, 142 bp, synthetic construct
  source 1..142: mol_type = other DNA
ataggtcaaaggtcatgatctataggtcaaaggtcatacgctataggtcaaaggtcatgccgctataggtcaaaggtcatgctttataggtcaaaggtcatgatctataggtcaaaggtcatacgctataggtcaaaggtca

SEQ ID NO: 8431 - DNA, 142 bp, synthetic construct
  source 1..142: mol_type = other DNA
tgacctttgacctattgatcttgacctttgacctattacgcttgacctttgacctattgccgcttgacctttgacctattgcttttgacctttgacctattgatcttgacctttgacctattacgcttgacctttgacctat

SEQ ID NO: 8432 - DNA, 142 bp, synthetic construct
  source 1..142: mol_type = other DNA
ctagggcaaaggtcatgatctctagggcaaaggtcatacgctctagggcaaaggtcatgccgctctagggcaaaggtcatgctttctagggcaaaggtcatgatctctagggcaaaggtcatacgctctagggcaaaggtca

SEQ ID NO: 8433 - DNA, 142 bp, synthetic construct
  source 1..142: mol_type = other DNA
tgacctttgccctagtgatcttgacctttgccctagtacgcttgacctttgccctagtgccgcttgacctttgccctagtgcttttgacctttgccctagtgatcttgacctttgccctagtacgcttgacctttgccctag

SEQ ID NO: 8434 - DNA, 142 bp, synthetic construct
  source 1..142: mol_type = other DNA
ctaggtcaaaggtcatgatctctaggtcaaaggtcatacgctctaggtcaaaggtcatgccgctctaggtcaaaggtcatgctttctaggtcaaaggtcatgatctctaggtcaaaggtcatacgctctaggtcaaaggtca

SEQ ID NO: 8435 - DNA, 142 bp, synthetic construct
  source 1..142: mol_type = other DNA
tgacctttgacctagtgatcttgacctttgacctagtacgcttgacctttgacctagtgccgcttgacctttgacctagtgcttttgacctttgacctagtgatcttgacctttgacctagtacgcttgacctttgacctag

SEQ ID NO: 8436 - DNA, 142 bp, synthetic construct
  source 1..142: mol_type = other DNA
gtagggcaaaggtcatgatctgtagggcaaaggtcatacgctgtagggcaaaggtcatgccgctgtagggcaaaggtcatgctttgtagggcaaaggtcatgatctgtagggcaaaggtcatacgctgtagggcaaaggtca

SEQ ID NO: 8437 - DNA, 142 bp, synthetic construct
  source 1..142: mol_type = other DNA
tgacctttgccctactgatcttgacctttgccctactacgcttgacctttgccctactgccgcttgacctttgccctactgcttttgacctttgccctactgatcttgacctttgccctactacgcttgacctttgccctac

SEQ ID NO: 8438 - DNA, 142 bp, synthetic construct
  source 1..142: mol_type = other DNA
gtaggtcaaaggtcatgatctgtaggtcaaaggtcatacgctgtaggtcaaaggtcatgccgctgtaggtcaaaggtcatgctttgtaggtcaaaggtcatgatctgtaggtcaaaggtcatacgctgtaggtcaaaggtca

SEQ ID NO: 8439 - DNA, 142 bp, synthetic construct
  source 1..142: mol_type = other DNA
tgacctttgacctactgatcttgacctttgacctactacgcttgacctttgacctactgccgcttgacctttgacctactgcttttgacctttgacctactgatcttgacctttgacctactacgcttgacctttgacctac

SEQ ID NO: 8440 - DNA, 140 bp, synthetic construct
  source 1..140: mol_type = other DNA
accacatgactgccgctaccacatgactgctttaccacatgactgatctaccacatgactacgctaccacatgactgccgctaccacatgactgctttaccacatgactgatctaccacatgactacgctaccacatgac

SEQ ID NO: 8441 - DNA, 140 bp, synthetic construct
  source 1..140: mol_type = other DNA
gtcatgtggttgccgctgtcatgtggttgctttgtcatgtggttgatctgtcatgtggttacgctgtcatgtggttgccgctgtcatgtggttgctttgtcatgtggttgatctgtcatgtggttacgctgtcatgtggt

SEQ ID NO: 8442 - DNA, 140 bp, synthetic construct
  source 1..140: mol_type = other DNA
accacatgattgccgctaccacatgattgctttaccacatgattgatctaccacatgattacgctaccacatgattgccgctaccacatgattgctttaccacatgattgatctaccacatgattacgctaccacatgat

SEQ ID NO: 8443 - DNA, 140 bp, synthetic construct
  source 1..140: mol_type = other DNA
atcatgtggttgccgctatcatgtggttgctttatcatgtggttgatctatcatgtggttacgctatcatgtggttgccgctatcatgtggttgctttatcatgtggttgatctatcatgtggttacgctatcatgtggt

SEQ ID NO: 8444 - DNA, 140 bp, synthetic construct
  source 1..140: mol_type = other DNA
accacgtgactgccgctaccacgtgactgctttaccacgtgactgatctaccacgtgactacgctaccacgtgactgccgctaccacgtgactgctttaccacgtgactgatctaccacgtgactacgctaccacgtgac

SEQ ID NO: 8445 - DNA, 140 bp, synthetic construct
  source 1..140: mol_type = other DNA
gtcacgtggttgccgctgtcacgtggttgctttgtcacgtggttgatctgtcacgtggttacgctgtcacgtggttgccgctgtcacgtggttgctttgtcacgtggttgatctgtcacgtggttacgctgtcacgtggt

SEQ ID NO: 8446 - DNA, 140 bp, synthetic construct
  source 1..140: mol_type = other DNA
accacgtgattgccgctaccacgtgattgctttaccacgtgattgatctaccacgtgattacgctaccacgtgattgccgctaccacgtgattgctttaccacgtgattgatctaccacgtgattacgctaccacgtgat

SEQ ID NO: 8447 - DNA, 140 bp, synthetic construct
  source 1..140: mol_type = other DNA
atcacgtggttgccgctatcacgtggttgctttatcacgtggttgatctatcacgtggttacgctatcacgtggttgccgctatcacgtggttgctttatcacgtggttgatctatcacgtggttacgctatcacgtggt

SEQ ID NO: 8448 - DNA, 140 bp, synthetic construct
  source 1..140: mol_type = other DNA
gccacatgactgccgctgccacatgactgctttgccacatgactgatctgccacatgactacgctgccacatgactgccgctgccacatgactgctttgccacatgactgatctgccacatgactacgctgccacatgac

SEQ ID NO: 8449 - DNA, 140 bp, synthetic construct
  source 1..140: mol_type = other DNA
gtcatgtggctgccgctgtcatgtggctgctttgtcatgtggctgatctgtcatgtggctacgctgtcatgtggctgccgctgtcatgtggctgctttgtcatgtggctgatctgtcatgtggctacgctgtcatgtggc

SEQ ID NO: 8450 - DNA, 140 bp, synthetic construct
  source 1..140: mol_type = other DNA
gccacatgattgccgctgccacatgattgctttgccacatgattgatctgccacatgattacgctgccacatgattgccgctgccacatgattgctttgccacatgattgatctgccacatgattacgctgccacatgat

SEQ ID NO: 8451 - DNA, 140 bp, synthetic construct
  source 1..140: mol_type = other DNA
atcatgtggctgccgctatcatgtggctgctttatcatgtggctgatctatcatgtggctacgctatcatgtggctgccgctatcatgtggctgctttatcatgtggctgatctatcatgtggctacgctatcatgtggc

SEQ ID NO: 8452 - DNA, 140 bp, synthetic construct
  source 1..140: mol_type = other DNA
gccacgtgactgccgctgccacgtgactgctttgccacgtgactgatctgccacgtgactacgctgccacgtgactgccgctgccacgtgactgctttgccacgtgactgatctgccacgtgactacgctgccacgtgac

SEQ ID NO: 8453 - DNA, 140 bp, synthetic construct
  source 1..140: mol_type = other DNA
gtcacgtggctgccgctgtcacgtggctgctttgtcacgtggctgatctgtcacgtggctacgctgtcacgtggctgccgctgtcacgtggctgctttgtcacgtggctgatctgtcacgtggctacgctgtcacgtggc

SEQ ID NO: 8454 - DNA, 140 bp, synthetic construct
  source 1..140: mol_type = other DNA
gccacgtgattgccgctgccacgtgattgctttgccacgtgattgatctgccacgtgattacgctgccacgtgattgccgctgccacgtgattgctttgccacgtgattgatctgccacgtgattacgctgccacgtgat

SEQ ID NO: 8455 - DNA, 140 bp, synthetic construct
  source 1..140: mol_type = other DNA
atcacgtggctgccgctatcacgtggctgctttatcacgtggctgatctatcacgtggctacgctatcacgtggctgccgctatcacgtggctgctttatcacgtggctgatctatcacgtggctacgctatcacgtggc

SEQ ID NO: 8456 - DNA, 140 bp, synthetic construct
  source 1..140: mol_type = other DNA
aactaggtcatgccgctaactaggtcatgctttaactaggtcatgatctaactaggtcatacgctaactaggtcatgccgctaactaggtcatgctttaactaggtcatgatctaactaggtcatacgctaactaggtca

SEQ ID NO: 8457 - DNA, 140 bp, synthetic construct
  source 1..140: mol_type = other DNA
tgacctagtttgccgcttgacctagtttgcttttgacctagtttgatcttgacctagtttacgcttgacctagtttgccgcttgacctagtttgcttttgacctagtttgatcttgacctagtttacgcttgacctagtt

SEQ ID NO: 8458 - DNA, 140 bp, synthetic construct
  source 1..140: mol_type = other DNA
aattaggtcatgccgctaattaggtcatgctttaattaggtcatgatctaattaggtcatacgctaattaggtcatgccgctaattaggtcatgctttaattaggtcatgatctaattaggtcatacgctaattaggtca

SEQ ID NO: 8459 - DNA, 140 bp, synthetic construct
  source 1..140: mol_type = other DNA
tgacctaatttgccgcttgacctaatttgcttttgacctaatttgatcttgacctaatttacgcttgacctaatttgccgcttgacctaatttgcttttgacctaatttgatcttgacctaatttacgcttgacctaatt

SEQ ID NO: 8460 - DNA, 146 bp, synthetic construct
  source 1..146: mol_type = other DNA
cagataagatacgctcagataagatgccgctcagataagatgctttcagataagatgatctcagataagatacgctcagataagatgccgctcagataagatgctttcagataagatgatctcagataagatacgctcagataaga

SEQ ID NO: 8461 - DNA, 146 bp, synthetic construct
  source 1..146: mol_type = other DNA
tcttatctgtacgcttcttatctgtgccgcttcttatctgtgcttttcttatctgtgatcttcttatctgtacgcttcttatctgtgccgcttcttatctgtgcttttcttatctgtgatcttcttatctgtacgcttcttatctg

SEQ ID NO: 8462 - DNA, 146 bp, synthetic construct; identical to SEQ ID NO: 6610
  source 1..146: mol_type = other DNA

SEQ ID NO: 8463 - DNA, 146 bp, synthetic construct; identical to SEQ ID NO: 6611
  source 1..146: mol_type = other DNA

SEQ ID NO: 8464 - DNA, 146 bp, synthetic construct
  source 1..146: mol_type = other DNA
ctgataagatacgctctgataagatgccgctctgataagatgctttctgataagatgatctctgataagatacgctctgataagatgccgctctgataagatgctttctgataagatgatctctgataagatacgctctgataaga

SEQ ID NO: 8465 - DNA, 146 bp, synthetic construct
  source 1..146: mol_type = other DNA
tcttatcagtacgcttcttatcagtgccgcttcttatcagtgcttttcttatcagtgatcttcttatcagtacgcttcttatcagtgccgcttcttatcagtgcttttcttatcagtgatcttcttatcagtacgcttcttatcag

SEQ ID NO: 8466 - DNA, 146 bp, synthetic construct
  source 1..146: mol_type = other DNA
ctgataaggtacgctctgataaggtgccgctctgataaggtgctttctgataaggtgatctctgataaggtacgctctgataaggtgccgctctgataaggtgctttctgataaggtgatctctgataaggtacgctctgataagg

SEQ ID NO: 8467 - DNA, 146 bp, synthetic construct
  source 1..146: mol_type = other DNA
ccttatcagtacgctccttatcagtgccgctccttatcagtgctttccttatcagtgatctccttatcagtacgctccttatcagtgccgctccttatcagtgctttccttatcagtgatctccttatcagtacgctccttatcag

SEQ ID NO: 8468 - DNA, 146 bp, synthetic construct
  source 1..146: mol_type = other DNA
gagataagatacgctgagataagatgccgctgagataagatgctttgagataagatgatctgagataagatacgctgagataagatgccgctgagataagatgctttgagataagatgatctgagataagatacgctgagataaga

SEQ ID NO: 8469 - DNA, 146 bp, synthetic construct
  source 1..146: mol_type = other DNA
tcttatctctacgcttcttatctctgccgcttcttatctctgcttttcttatctctgatcttcttatctctacgcttcttatctctgccgcttcttatctctgcttttcttatctctgatcttcttatctctacgcttcttatctc

SEQ ID NO: 8470 - DNA, 146 bp, synthetic construct; identical to SEQ ID NO: 6913
  source 1..146: mol_type = other DNA

SEQ ID NO: 8471 - DNA, 146 bp, synthetic construct; identical to SEQ ID NO: 6912
  source 1..146: mol_type = other DNA

SEQ ID NO: 8472 - DNA, 146 bp, synthetic construct
  source 1..146: mol_type = other DNA
gtgataagatacgctgtgataagatgccgctgtgataagatgctttgtgataagatgatctgtgataagatacgctgtgataagatgccgctgtgataagatgctttgtgataagatgatctgtgataagatacgctgtgataaga

SEQ ID NO: 8473 - DNA, 146 bp, synthetic construct
  source 1..146: mol_type = other DNA
tcttatcactacgcttcttatcactgccgcttcttatcactgcttttcttatcactgatcttcttatcactacgcttcttatcactgccgcttcttatcactgcttttcttatcactgatcttcttatcactacgcttcttatcac

SEQ ID NO: 8474 - DNA, 146 bp, synthetic construct
  source 1..146: mol_type = other DNA
gtgataaggtacgctgtgataaggtgccgctgtgataaggtgctttgtgataaggtgatctgtgataaggtacgctgtgataaggtgccgctgtgataaggtgctttgtgataaggtgatctgtgataaggtacgctgtgataagg

SEQ ID NO: 8475 - DNA, 146 bp, synthetic construct
  source 1..146: mol_type = other DNA
ccttatcactacgctccttatcactgccgctccttatcactgctttccttatcactgatctccttatcactacgctccttatcactgccgctccttatcactgctttccttatcactgatctccttatcactacgctccttatcac

SEQ ID NO: 8476 - DNA, 146 bp, synthetic construct
  source 1..146: mol_type = other DNA
tagataagatacgcttagataagatgccgcttagataagatgcttttagataagatgatcttagataagatacgcttagataagatgccgcttagataagatgcttttagataagatgatcttagataagatacgcttagataaga

SEQ ID NO: 8477 - DNA, 146 bp, synthetic construct
  source 1..146: mol_type = other DNA
tcttatctatacgcttcttatctatgccgcttcttatctatgcttttcttatctatgatcttcttatctatacgcttcttatctatgccgcttcttatctatgcttttcttatctatgatcttcttatctatacgcttcttatcta

SEQ ID NO: 8478 - DNA, 146 bp, synthetic construct
  source 1..146: mol_type = other DNA
tagataaggtacgcttagataaggtgccgcttagataaggtgcttttagataaggtgatcttagataaggtacgcttagataaggtgccgcttagataaggtgcttttagataaggtgatcttagataaggtacgcttagataagg

SEQ ID NO: 8479 - DNA, 146 bp, synthetic construct
  source 1..146: mol_type = other DNA
ccttatctatacgctccttatctatgccgctccttatctatgctttccttatctatgatctccttatctatacgctccttatctatgccgctccttatctatgctttccttatctatgatctccttatctatacgctccttatcta

SEQ ID NO: 8480 - DNA, 146 bp, synthetic construct
  source 1..146: mol_type = other DNA
ttgataagatacgctttgataagatgccgctttgataagatgctttttgataagatgatctttgataagatacgctttgataagatgccgctttgataagatgctttttgataagatgatctttgataagatacgctttgataaga

SEQ ID NO: 8481 - DNA, 146 bp, synthetic construct
  source 1..146: mol_type = other DNA
tcttatcaatacgcttcttatcaatgccgcttcttatcaatgcttttcttatcaatgatcttcttatcaatacgcttcttatcaatgccgcttcttatcaatgcttttcttatcaatgatcttcttatcaatacgcttcttatcaa

SEQ ID NO: 8482 - DNA, 146 bp, synthetic construct
  source 1..146: mol_type = other DNA
ttgataaggtacgctttgataaggtgccgctttgataaggtgctttttgataaggtgatctttgataaggtacgctttgataaggtgccgctttgataaggtgctttttgataaggtgatctttgataaggtacgctttgataagg

SEQ ID NO: 8483 - DNA, 146 bp, synthetic construct
  source 1..146: mol_type = other DNA
ccttatcaatacgctccttatcaatgccgctccttatcaatgctttccttatcaatgatctccttatcaatacgctccttatcaatgccgctccttatcaatgctttccttatcaatgatctccttatcaatacgctccttatcaa

SEQ ID NO: 8484 - DNA, 139 bp, synthetic construct
  source 1..139: mol_type = other DNA
ggccaaaggtcatgctttggccaaaggtcatgatctggccaaaggtcatacgctggccaaaggtcatgccgctggccaaaggtcatgctttggccaaaggtcatgatctggccaaaggtcatacgctggccaaaggtca

SEQ ID NO: 8485 - DNA, 139 bp, synthetic construct
  source 1..139: mol_type = other DNA
tgacctttggcctgcttttgacctttggcctgatcttgacctttggcctacgcttgacctttggcctgccgcttgacctttggcctgcttttgacctttggcctgatcttgacctttggcctacgcttgacctttggcc

SEQ ID NO: 8486 - DNA, 139 bp, synthetic construct
  source 1..139: mol_type = other DNA
ggccagaggtcatgctttggccagaggtcatgatctggccagaggtcatacgctggccagaggtcatgccgctggccagaggtcatgctttggccagaggtcatgatctggccagaggtcatacgctggccagaggtca

SEQ ID NO: 8487 - DNA, 139 bp, synthetic construct
  source 1..139: mol_type = other DNA
tgacctctggcctgcttttgacctctggcctgatcttgacctctggcctacgcttgacctctggcctgccgcttgacctctggcctgcttttgacctctggcctgatcttgacctctggcctacgcttgacctctggcc

SEQ ID NO: 8488 - DNA, 139 bp, synthetic construct
  source 1..139: mol_type = other DNA
gggcaaaggtcatgctttgggcaaaggtcatgatctgggcaaaggtcatacgctgggcaaaggtcatgccgctgggcaaaggtcatgctttgggcaaaggtcatgatctgggcaaaggtcatacgctgggcaaaggtca

SEQ ID NO: 8489 - DNA, 139 bp, synthetic construct
  source 1..139: mol_type = other DNA
tgacctttgccctgcttttgacctttgccctgatcttgacctttgccctacgcttgacctttgccctgccgcttgacctttgccctgcttttgacctttgccctgatcttgacctttgccctacgcttgacctttgccc

SEQ ID NO: 8490 - DNA, 139 bp, synthetic construct
  source 1..139: mol_type = other DNA
gggcagaggtcatgctttgggcagaggtcatgatctgggcagaggtcatacgctgggcagaggtcatgccgctgggcagaggtcatgctttgggcagaggtcatgatctgggcagaggtcatacgctgggcagaggtca

SEQ ID NO: 8491 - DNA, 139 bp, synthetic construct
  source 1..139: mol_type = other DNA
tgacctctgccctgcttttgacctctgccctgatcttgacctctgccctacgcttgacctctgccctgccgcttgacctctgccctgcttttgacctctgccctgatcttgacctctgccctacgcttgacctctgccc

SEQ ID NO: 8492 - DNA, 139 bp, synthetic construct
  source 1..139: mol_type = other DNA
ggtcaaaggtcatgctttggtcaaaggtcatgatctggtcaaaggtcatacgctggtcaaaggtcatgccgctggtcaaaggtcatgctttggtcaaaggtcatgatctggtcaaaggtcatacgctggtcaaaggtca

SEQ ID NO: 8493 - DNA, 139 bp, synthetic construct
  source 1..139: mol_type = other DNA
tgacctttgacctgcttttgacctttgacctgatcttgacctttgacctacgcttgacctttgacctgccgcttgacctttgacctgcttttgacctttgacctgatcttgacctttgacctacgcttgacctttgacc

SEQ ID NO: 8494 - DNA, 139 bp, synthetic construct
  source 1..139: mol_type = other DNA
ggtcagaggtcatgctttggtcagaggtcatgatctggtcagaggtcatacgctggtcagaggtcatgccgctggtcagaggtcatgctttggtcagaggtcatgatctggtcagaggtcatacgctggtcagaggtca

SEQ ID NO: 8495 - DNA, 139 bp, synthetic construct
  source 1..139: mol_type = other DNA
tgacctctgacctgcttttgacctctgacctgatcttgacctctgacctacgcttgacctctgacctgccgcttgacctctgacctgcttttgacctctgacctgatcttgacctctgacctacgcttgacctctgacc

SEQ ID NO: 8496 - DNA, 139 bp, synthetic construct
  source 1..139: mol_type = other DNA
gtccaaaggtcatgctttgtccaaaggtcatgatctgtccaaaggtcatacgctgtccaaaggtcatgccgctgtccaaaggtcatgctttgtccaaaggtcatgatctgtccaaaggtcatacgctgtccaaaggtca

SEQ ID NO: 8497 - DNA, 139 bp, synthetic construct
  source 1..139: mol_type = other DNA
tgacctttggactgcttttgacctttggactgatcttgacctttggactacgcttgacctttggactgccgcttgacctttggactgcttttgacctttggactgatcttgacctttggactacgcttgacctttggac

SEQ ID NO: 8498 - DNA, 139 bp, synthetic construct
  source 1..139: mol_type = other DNA
gtccagaggtcatgctttgtccagaggtcatgatctgtccagaggtcatacgctgtccagaggtcatgccgctgtccagaggtcatgctttgtccagaggtcatgatctgtccagaggtcatacgctgtccagaggtca

SEQ ID NO: 8499 - DNA, 139 bp, synthetic construct
  source 1..139: mol_type = other DNA
tgacctctggactgcttttgacctctggactgatcttgacctctggactacgcttgacctctggactgccgcttgacctctggactgcttttgacctctggactgatcttgacctctggactacgcttgacctctggac

SEQ ID NO: 8500 - DNA, 139 bp, synthetic construct
  source 1..139: mol_type = other DNA
gtgcaaaggtcatgctttgtgcaaaggtcatgatctgtgcaaaggtcatacgctgtgcaaaggtcatgccgctgtgcaaaggtcatgctttgtgcaaaggtcatgatctgtgcaaaggtcatacgctgtgcaaaggtca

SEQ ID NO: 8501 - DNA, 139 bp, synthetic construct
  source 1..139: mol_type = other DNA
tgacctttgcactgcttttgacctttgcactgatcttgacctttgcactacgcttgacctttgcactgccgcttgacctttgcactgcttttgacctttgcactgatcttgacctttgcactacgcttgacctttgcac

SEQ ID NO: 8502 - DNA, 139 bp, synthetic construct
  source 1..139: mol_type = other DNA
gtgcagaggtcatgctttgtgcagaggtcatgatctgtgcagaggtcatacgctgtgcagaggtcatgccgctgtgcagaggtcatgctttgtgcagaggtcatgatctgtgcagaggtcatacgctgtgcagaggtca

SEQ ID NO: 8503 - DNA, 139 bp, synthetic construct
  source 1..139: mol_type = other DNA
tgacctctgcactgcttttgacctctgcactgatcttgacctctgcactacgcttgacctctgcactgccgcttgacctctgcactgcttttgacctctgcactgatcttgacctctgcactacgcttgacctctgcac

SEQ ID NO: 8504 - DNA, 139 bp, synthetic construct
  source 1..139: mol_type = other DNA
gttcaaaggtcatgctttgttcaaaggtcatgatctgttcaaaggtcatacgctgttcaaaggtcatgccgctgttcaaaggtcatgctttgttcaaaggtcatgatctgttcaaaggtcatacgctgttcaaaggtca

SEQ ID NO: 8505 - DNA, 139 bp, synthetic construct
  source 1..139: mol_type = other DNA
tgacctttgaactgcttttgacctttgaactgatcttgacctttgaactacgcttgacctttgaactgccgcttgacctttgaactgcttttgacctttgaactgatcttgacctttgaactacgcttgacctttgaac

SEQ ID NO: 8506 - DNA, 139 bp, synthetic construct
  source 1..139: mol_type = other DNA
gttcagaggtcatgctttgttcagaggtcatgatctgttcagaggtcatacgctgttcagaggtcatgccgctgttcagaggtcatgctttgttcagaggtcatgatctgttcagaggtcatacgctgttcagaggtca

SEQ ID NO: 8507 - DNA, 139 bp, synthetic construct
  source 1..139: mol_type = other DNA
tgacctctgaactgcttttgacctctgaactgatcttgacctctgaactacgcttgacctctgaactgccgcttgacctctgaactgcttttgacctctgaactgatcttgacctctgaactacgcttgacctctgaac

SEQ ID NO: 8508 - DNA, 139 bp, synthetic construct
  source 1..139: mol_type = other DNA
agctagcccctgcctacctacgctagctagcccctgcctacctgccgctagctagcccctgcctacctgctttagctagcccctgcctacctgatctagctagcccctgcctacctacgctagctagcccctgcctacc

SEQ ID NO: 8509 - DNA, 139 bp, synthetic construct
  source 1..139: mol_type = other DNA
ggtaggcaggggctagcttacgctggtaggcaggggctagcttgccgctggtaggcaggggctagcttgctttggtaggcaggggctagcttgatctggtaggcaggggctagcttacgctggtaggcaggggctagct

SEQ ID NO: 8510 - DNA, 139 bp, synthetic construct
  source 1..139: mol_type = other DNA
agctagccccttcctacctacgctagctagccccttcctacctgccgctagctagccccttcctacctgctttagctagccccttcctacctgatctagctagccccttcctacctacgctagctagccccttcctacc

SEQ ID NO: 8511 - DNA, 139 bp, synthetic construct
  source 1..139: mol_type = other DNA
ggtaggaaggggctagcttacgctggtaggaaggggctagcttgccgctggtaggaaggggctagcttgctttggtaggaaggggctagcttgatctggtaggaaggggctagcttacgctggtaggaaggggctagct

SEQ ID NO: 8512 - DNA, 139 bp, synthetic construct
  source 1..139: mol_type = other DNA
atctagcccctgcctacctacgctatctagcccctgcctacctgccgctatctagcccctgcctacctgctttatctagcccctgcctacctgatctatctagcccctgcctacctacgctatctagcccctgcctacc

SEQ ID NO: 8513 - DNA, 139 bp, synthetic construct
  source 1..139: mol_type = other DNA
ggtaggcaggggctagattacgctggtaggcaggggctagattgccgctggtaggcaggggctagattgctttggtaggcaggggctagattgatctggtaggcaggggctagattacgctggtaggcaggggctagat

SEQ ID NO: 8514 - DNA, 139 bp, synthetic construct
  source 1..139: mol_type = other DNA
atctagccccttcctacctacgctatctagccccttcctacctgccgctatctagccccttcctacctgctttatctagccccttcctacctgatctatctagccccttcctacctacgctatctagccccttcctacc

SEQ ID NO: 8515 - DNA, 139 bp, synthetic construct
  source 1..139: mol_type = other DNA
ggtaggaaggggctagattacgctggtaggaaggggctagattgccgctggtaggaaggggctagattgctttggtaggaaggggctagattgatctggtaggaaggggctagattacgctggtaggaaggggctagat

SEQ ID NO: 8516 - DNA, 139 bp, synthetic construct
  source 1..139: mol_type = other DNA
ggctagcccctgcctacctacgctggctagcccctgcctacctgccgctggctagcccctgcctacctgctttggctagcccctgcctacctgatctggctagcccctgcctacctacgctggctagcccctgcctacc

SEQ ID NO: 8517 - DNA, 139 bp, synthetic construct
  source 1..139: mol_type = other DNA
ggtaggcaggggctagcctacgctggtaggcaggggctagcctgccgctggtaggcaggggctagcctgctttggtaggcaggggctagcctgatctggtaggcaggggctagcctacgctggtaggcaggggctagcc

SEQ ID NO: 8518 - DNA, 139 bp, synthetic construct
  source 1..139: mol_type = other DNA
ggctagccccttcctacctacgctggctagccccttcctacctgccgctggctagccccttcctacctgctttggctagccccttcctacctgatctggctagccccttcctacctacgctggctagccccttcctacc

SEQ ID NO: 8519 - DNA, 139 bp, synthetic construct
  source 1..139: mol_type = other DNA
ggtaggaaggggctagcctacgctggtaggaaggggctagcctgccgctggtaggaaggggctagcctgctttggtaggaaggggctagcctgatctggtaggaaggggctagcctacgctggtaggaaggggctagcc

SEQ ID NO: 8520 - DNA, 139 bp, synthetic construct
  source 1..139: mol_type = other DNA
gtctagcccctgcctacctacgctgtctagcccctgcctacctgccgctgtctagcccctgcctacctgctttgtctagcccctgcctacctgatctgtctagcccctgcctacctacgctgtctagcccctgcctacc

SEQ ID NO: 8521 - DNA, 139 bp, synthetic construct
  source 1..139: mol_type = other DNA
ggtaggcaggggctagactacgctggtaggcaggggctagactgccgctggtaggcaggggctagactgctttggtaggcaggggctagactgatctggtaggcaggggctagactacgctggtaggcaggggctagac

SEQ ID NO: 8522 - DNA, 139 bp, synthetic construct
  source 1..139: mol_type = other DNA
gtctagccccttcctacctacgctgtctagccccttcctacctgccgctgtctagccccttcctacctgctttgtctagccccttcctacctgatctgtctagccccttcctacctacgctgtctagccccttcctacc

SEQ ID NO: 8523 - DNA, 139 bp, synthetic construct
  source 1..139: mol_type = other DNA
ggtaggaaggggctagactacgctggtaggaaggggctagactgccgctggtaggaaggggctagactgctttggtaggaaggggctagactgatctggtaggaaggggctagactacgctggtaggaaggggctagac

SEQ ID NO: 8524 - DNA, 147 bp, synthetic construct
  source 1..147: mol_type = other DNA
aaactaggtcaaatgctttaaactaggtcaaatgatctaaactaggtcaaatacgctaaactaggtcaaatgccgctaaactaggtcaaatgctttaaactaggtcaaatgatctaaactaggtcaaatacgctaaactaggtcaaa

SEQ ID NO: 8525 - DNA, 147 bp, synthetic construct
  source 1..147: mol_type = other DNA
tttgacctagttttgcttttttgacctagttttgatcttttgacctagttttacgcttttgacctagttttgccgcttttgacctagttttgcttttttgacctagttttgatcttttgacctagttttacgcttttgacctagttt

SEQ ID NO: 8526 - DNA, 147 bp, synthetic construct
  source 1..147: mol_type = other DNA
aaactaggtcaagtgctttaaactaggtcaagtgatctaaactaggtcaagtacgctaaactaggtcaagtgccgctaaactaggtcaagtgctttaaactaggtcaagtgatctaaactaggtcaagtacgctaaactaggtcaag

SEQ ID NO: 8527 - DNA, 147 bp, synthetic construct
  source 1..147: mol_type = other DNA
cttgacctagttttgctttcttgacctagttttgatctcttgacctagttttacgctcttgacctagttttgccgctcttgacctagttttgctttcttgacctagttttgatctcttgacctagttttacgctcttgacctagttt

SEQ ID NO: 8528 - DNA, 147 bp, synthetic construct
  source 1..147: mol_type = other DNA
aaactaggtcaattgctttaaactaggtcaattgatctaaactaggtcaattacgctaaactaggtcaattgccgctaaactaggtcaattgctttaaactaggtcaattgatctaaactaggtcaattacgctaaactaggtcaat

SEQ ID NO: 8529 - DNA, 147 bp, synthetic construct
  source 1..147: mol_type = other DNA
attgacctagttttgctttattgacctagttttgatctattgacctagttttacgctattgacctagttttgccgctattgacctagttttgctttattgacctagttttgatctattgacctagttttacgctattgacctagttt

SEQ ID NO: 8530 - DNA, 147 bp, synthetic construct
  source 1..147: mol_type = other DNA
aaactaggtcagatgctttaaactaggtcagatgatctaaactaggtcagatacgctaaactaggtcagatgccgctaaactaggtcagatgctttaaactaggtcagatgatctaaactaggtcagatacgctaaactaggtcaga

SEQ ID NO: 8531 - DNA, 147 bp, synthetic construct
  source 1..147: mol_type = other DNA
tctgacctagttttgcttttctgacctagttttgatcttctgacctagttttacgcttctgacctagttttgccgcttctgacctagttttgcttttctgacctagttttgatcttctgacctagttttacgcttctgacctagttt

SEQ ID NO: 8532 - DNA, 147 bp, synthetic construct
  source 1..147: mol_type = other DNA
aaactaggtcaggtgctttaaactaggtcaggtgatctaaactaggtcaggtacgctaaactaggtcaggtgccgctaaactaggtcaggtgctttaaactaggtcaggtgatctaaactaggtcaggtacgctaaactaggtcagg

SEQ ID NO: 8533 - DNA, 147 bp, synthetic construct
  source 1..147: mol_type = other DNA
cctgacctagttttgctttcctgacctagttttgatctcctgacctagttttacgctcctgacctagttttgccgctcctgacctagttttgctttcctgacctagttttgatctcctgacctagttttacgctcctgacctagttt

SEQ ID NO: 8534 - DNA, 147 bp, synthetic construct
  source 1..147: mol_type = other DNA
aaactaggtcagttgctttaaactaggtcagttgatctaaactaggtcagttacgctaaactaggtcagttgccgctaaactaggtcagttgctttaaactaggtcagttgatctaaactaggtcagttacgctaaactaggtcagt

SEQ ID NO: 8535 - DNA, 147 bp, synthetic construct
  source 1..147: mol_type = other DNA
actgacctagttttgctttactgacctagttttgatctactgacctagttttacgctactgacctagttttgccgctactgacctagttttgctttactgacctagttttgatctactgacctagttttacgctactgacctagttt

SEQ ID NO: 8536 - DNA, 147 bp, synthetic construct
  source 1..147: mol_type = other DNA
aatctaggtcaaatgctttaatctaggtcaaatgatctaatctaggtcaaatacgctaatctaggtcaaatgccgctaatctaggtcaaatgctttaatctaggtcaaatgatctaatctaggtcaaatacgctaatctaggtcaaa

SEQ ID NO: 8537 - DNA, 147 bp, synthetic construct
  source 1..147: mol_type = other DNA
tttgacctagatttgcttttttgacctagatttgatcttttgacctagatttacgcttttgacctagatttgccgcttttgacctagatttgcttttttgacctagatttgatcttttgacctagatttacgcttttgacctagatt

SEQ ID NO: 8538 - DNA, 147 bp, synthetic construct
  source 1..147: mol_type = other DNA
aatctaggtcaagtgctttaatctaggtcaagtgatctaatctaggtcaagtacgctaatctaggtcaagtgccgctaatctaggtcaagtgctttaatctaggtcaagtgatctaatctaggtcaagtacgctaatctaggtcaag

SEQ ID NO: 8539 - DNA, 147 bp, synthetic construct
  source 1..147: mol_type = other DNA
cttgacctagatttgctttcttgacctagatttgatctcttgacctagatttacgctcttgacctagatttgccgctcttgacctagatttgctttcttgacctagatttgatctcttgacctagatttacgctcttgacctagatt

SEQ ID NO: 8540 - DNA, 147 bp, synthetic construct
  source 1..147: mol_type = other DNA
aatctaggtcaattgctttaatctaggtcaattgatctaatctaggtcaattacgctaatctaggtcaattgccgctaatctaggtcaattgctttaatctaggtcaattgatctaatctaggtcaattacgctaatctaggtcaat

SEQ ID NO: 8541 - DNA, 147 bp, synthetic construct
  source 1..147: mol_type = other DNA
attgacctagatttgctttattgacctagatttgatctattgacctagatttacgctattgacctagatttgccgctattgacctagatttgctttattgacctagatttgatctattgacctagatttacgctattgacctagatt

SEQ ID NO: 8542 - DNA, 147 bp, synthetic construct
  source 1..147: mol_type = other DNA
aatctaggtcagatgctttaatctaggtcagatgatctaatctaggtcagatacgctaatctaggtcagatgccgctaatctaggtcagatgctttaatctaggtcagatgatctaatctaggtcagatacgctaatctaggtcaga

SEQ ID NO: 8543 - DNA, 147 bp, synthetic construct
  source 1..147: mol_type = other DNA
tctgacctagatttgcttttctgacctagatttgatcttctgacctagatttacgcttctgacctagatttgccgcttctgacctagatttgcttttctgacctagatttgatcttctgacctagatttacgcttctgacctagatt

SEQ ID NO: 8544 - DNA, 147 bp, synthetic construct
  source 1..147: mol_type = other DNA
aatctaggtcaggtgctttaatctaggtcaggtgatctaatctaggtcaggtacgctaatctaggtcaggtgccgctaatctaggtcaggtgctttaatctaggtcaggtgatctaatctaggtcaggtacgctaatctaggtcagg

SEQ ID NO: 8545 - DNA, 147 bp, synthetic construct
  source 1..147: mol_type = other DNA
cctgacctagatttgctttcctgacctagatttgatctcctgacctagatttacgctcctgacctagatttgccgctcctgacctagatttgctttcctgacctagatttgatctcctgacctagatttacgctcctgacctagatt

SEQ ID NO: 8546 - DNA, 147 bp, synthetic construct
  source 1..147: mol_type = other DNA
aatctaggtcagttgctttaatctaggtcagttgatctaatctaggtcagttacgctaatctaggtcagttgccgctaatctaggtcagttgctttaatctaggtcagttgatctaatctaggtcagttacgctaatctaggtcagt

SEQ ID NO: 8547 - DNA, 147 bp, synthetic construct
  source 1..147: mol_type = other DNA
actgacctagatttgctttactgacctagatttgatctactgacctagatttacgctactgacctagatttgccgctactgacctagatttgctttactgacctagatttgatctactgacctagatttacgctactgacctagatt

SEQ ID NO: 8548 - DNA, 135 bp, synthetic construct
  source 1..135: mol_type = other DNA
ggacataacgtgcctgatctggacataacgtgcctacgctggacataacgtgcctgccgctggacataacgtgcctgctttggacataacgtgcctgatctggacataacgtgcctacgctggacataacgtgcc

SEQ ID NO: 8549 - DNA, 135 bp, synthetic construct
  source 1..135: mol_type = other DNA
ggcacgttatgtcctgatctggcacgttatgtcctacgctggcacgttatgtcctgccgctggcacgttatgtcctgctttggcacgttatgtcctgatctggcacgttatgtcctacgctggcacgttatgtcc

SEQ ID NO: 8550 - DNA, 135 bp, synthetic construct
  source 1..135: mol_type = other DNA
ggacataacgtgcttgatctggacataacgtgcttacgctggacataacgtgcttgccgctggacataacgtgcttgctttggacataacgtgcttgatctggacataacgtgcttacgctggacataacgtgct

SEQ ID NO: 8551 - DNA, 135 bp, synthetic construct
  source 1..135: mol_type = other DNA
agcacgttatgtcctgatctagcacgttatgtcctacgctagcacgttatgtcctgccgctagcacgttatgtcctgctttagcacgttatgtcctgatctagcacgttatgtcctacgctagcacgttatgtcc

SEQ ID NO: 8552 - DNA, 135 bp, synthetic construct
  source 1..135: mol_type = other DNA
ggacataatgtgcctgatctggacataatgtgcctacgctggacataatgtgcctgccgctggacataatgtgcctgctttggacataatgtgcctgatctggacataatgtgcctacgctggacataatgtgcc

SEQ ID NO: 8553 - DNA, 135 bp, synthetic construct
  source 1..135: mol_type = other DNA
ggcacattatgtcctgatctggcacattatgtcctacgctggcacattatgtcctgccgctggcacattatgtcctgctttggcacattatgtcctgatctggcacattatgtcctacgctggcacattatgtcc

SEQ ID NO: 8554 - DNA, 135 bp, synthetic construct
  source 1..135: mol_type = other DNA
ggacataatgtgcttgatctggacataatgtgcttacgctggacataatgtgcttgccgctggacataatgtgcttgctttggacataatgtgcttgatctggacataatgtgcttacgctggacataatgtgct

SEQ ID NO: 8555 - DNA, 135 bp, synthetic construct
  source 1..135: mol_type = other DNA
agcacattatgtcctgatctagcacattatgtcctacgctagcacattatgtcctgccgctagcacattatgtcctgctttagcacattatgtcctgatctagcacattatgtcctacgctagcacattatgtcc

SEQ ID NO: 8556 - DNA, 139 bp, synthetic construct
  source 1..139: mol_type = other DNA
ggtgctgacaggtgctttggtgctgacaggtgatctggtgctgacaggtacgctggtgctgacaggtgccgctggtgctgacaggtgctttggtgctgacaggtgatctggtgctgacaggtacgctggtgctgacagg

SEQ ID NO: 8557 - DNA, 139 bp, synthetic construct
  source 1..139: mol_type = other DNA
cctgtcagcacctgctttcctgtcagcacctgatctcctgtcagcacctacgctcctgtcagcacctgccgctcctgtcagcacctgctttcctgtcagcacctgatctcctgtcagcacctacgctcctgtcagcacc

SEQ ID NO: 8558 - DNA, 139 bp, synthetic construct
  source 1..139: mol_type = other DNA
ggtgctgacagctgctttggtgctgacagctgatctggtgctgacagctacgctggtgctgacagctgccgctggtgctgacagctgctttggtgctgacagctgatctggtgctgacagctacgctggtgctgacagc

SEQ ID NO: 8559 - DNA, 139 bp, synthetic construct
  source 1..139: mol_type = other DNA
gctgtcagcacctgctttgctgtcagcacctgatctgctgtcagcacctacgctgctgtcagcacctgccgctgctgtcagcacctgctttgctgtcagcacctgatctgctgtcagcacctacgctgctgtcagcacc

SEQ ID NO: 8560 - DNA, 139 bp, synthetic construct
  source 1..139: mol_type = other DNA
ggtgttgacaggtgctttggtgttgacaggtgatctggtgttgacaggtacgctggtgttgacaggtgccgctggtgttgacaggtgctttggtgttgacaggtgatctggtgttgacaggtacgctggtgttgacagg

SEQ ID NO: 8561 - DNA, 139 bp, synthetic construct
  source 1..139: mol_type = other DNA
cctgtcaacacctgctttcctgtcaacacctgatctcctgtcaacacctacgctcctgtcaacacctgccgctcctgtcaacacctgctttcctgtcaacacctgatctcctgtcaacacctacgctcctgtcaacacc

SEQ ID NO: 8562 - DNA, 139 bp, synthetic construct
  source 1..139: mol_type = other DNA
ggtgttgacagctgctttggtgttgacagctgatctggtgttgacagctacgctggtgttgacagctgccgctggtgttgacagctgctttggtgttgacagctgatctggtgttgacagctacgctggtgttgacagc

SEQ ID NO: 8563 - DNA, 139 bp, synthetic construct
  source 1..139: mol_type = other DNA
gctgtcaacacctgctttgctgtcaacacctgatctgctgtcaacacctacgctgctgtcaacacctgccgctgctgtcaacacctgctttgctgtcaacacctgatctgctgtcaacacctacgctgctgtcaacacc

SEQ ID NO: 8564 - DNA, 139 bp, synthetic construct
  source 1..139: mol_type = other DNA
ttaattgtttgttgctttttaattgtttgttgatctttaattgtttgttacgctttaattgtttgttgccgctttaattgtttgttgctttttaattgtttgttgatctttaattgtttgttacgctttaattgtttgt

SEQ ID NO: 8565 - DNA, 139 bp, synthetic construct
  source 1..139: mol_type = other DNA
acaaacaattaatgctttacaaacaattaatgatctacaaacaattaatacgctacaaacaattaatgccgctacaaacaattaatgctttacaaacaattaatgatctacaaacaattaatacgctacaaacaattaa

SEQ ID NO: 8566 - DNA, 139 bp, synthetic construct
  source 1..139: mol_type = other DNA
ttaattgttttttgctttttaattgttttttgatctttaattgttttttacgctttaattgttttttgccgctttaattgttttttgctttttaattgttttttgatctttaattgttttttacgctttaattgttttt

SEQ ID NO: 8567 - DNA, 139 bp, synthetic construct
  source 1..139: mol_type = other DNA
aaaaacaattaatgctttaaaaacaattaatgatctaaaaacaattaatacgctaaaaacaattaatgccgctaaaaacaattaatgctttaaaaacaattaatgatctaaaaacaattaatacgctaaaaacaattaa

SEQ ID NO: 8568 - DNA, 142 bp, synthetic construct
  source 1..142: mol_type = other DNA
accccactcctggtatgatctaccccactcctggtatacgctaccccactcctggtatgccgctaccccactcctggtatgctttaccccactcctggtatgatctaccccactcctggtatacgctaccccactcctggta

SEQ ID NO: 8569 - DNA, 142 bp, synthetic construct
  source 1..142: mol_type = other DNA
taccaggagtggggttgatcttaccaggagtggggttacgcttaccaggagtggggttgccgcttaccaggagtggggttgcttttaccaggagtggggttgatcttaccaggagtggggttacgcttaccaggagtggggt

SEQ ID NO: 8570 - DNA, 142 bp, synthetic construct
  source 1..142: mol_type = other DNA
accccactcctggtctgatctaccccactcctggtctacgctaccccactcctggtctgccgctaccccactcctggtctgctttaccccactcctggtctgatctaccccactcctggtctacgctaccccactcctggtc

SEQ ID NO: 8571 - DNA, 142 bp, synthetic construct
  source 1..142: mol_type = other DNA
gaccaggagtggggttgatctgaccaggagtggggttacgctgaccaggagtggggttgccgctgaccaggagtggggttgctttgaccaggagtggggttgatctgaccaggagtggggttacgctgaccaggagtggggt

SEQ ID NO: 8572 - DNA, 147 bp, synthetic construct
  source 1..147: mol_type = other DNA
cgaaaccgaaacctgctttcgaaaccgaaacctgatctcgaaaccgaaacctacgctcgaaaccgaaacctgccgctcgaaaccgaaacctgctttcgaaaccgaaacctgatctcgaaaccgaaacctacgctcgaaaccgaaacc

SEQ ID NO: 8573 - DNA, 147 bp, synthetic construct
  source 1..147: mol_type = other DNA
ggtttcggtttcgtgctttggtttcggtttcgtgatctggtttcggtttcgtacgctggtttcggtttcgtgccgctggtttcggtttcgtgctttggtttcggtttcgtgatctggtttcggtttcgtacgctggtttcggtttcg

SEQ ID NO: 8574 - DNA, 147 bp, synthetic construct
  source 1..147: mol_type = other DNA
cgaaaccgaaacttgctttcgaaaccgaaacttgatctcgaaaccgaaacttacgctcgaaaccgaaacttgccgctcgaaaccgaaacttgctttcgaaaccgaaacttgatctcgaaaccgaaacttacgctcgaaaccgaaact

SEQ ID NO: 8575 - DNA, 147 bp, synthetic construct
  source 1..147: mol_type = other DNA
agtttcggtttcgtgctttagtttcggtttcgtgatctagtttcggtttcgtacgctagtttcggtttcgtgccgctagtttcggtttcgtgctttagtttcggtttcgtgatctagtttcggtttcgtacgctagtttcggtttcg

SEQ ID NO: 8576 - DNA, 146 bp, synthetic construct
  source 1..146: mol_type = other DNA
actttccattacgctactttccattgccgctactttccattgctttactttccattgatctactttccattacgctactttccattgccgctactttccattgctttactttccattgatctactttccattacgctactttccat

SEQ ID NO: 8577 - DNA, 146 bp, synthetic construct
  source 1..146: mol_type = other DNA
atggaaagttacgctatggaaagttgccgctatggaaagttgctttatggaaagttgatctatggaaagttacgctatggaaagttgccgctatggaaagttgctttatggaaagttgatctatggaaagttacgctatggaaagt

SEQ ID NO: 8578 - DNA, 146 bp, synthetic construct
  source 1..146: mol_type = other DNA
actttccgttacgctactttccgttgccgctactttccgttgctttactttccgttgatctactttccgttacgctactttccgttgccgctactttccgttgctttactttccgttgatctactttccgttacgctactttccgt

SEQ ID NO: 8579 - DNA, 146 bp, synthetic construct
  source 1..146: mol_type = other DNA
acggaaagttacgctacggaaagttgccgctacggaaagttgctttacggaaagttgatctacggaaagttacgctacggaaagttgccgctacggaaagttgctttacggaaagttgatctacggaaagttacgctacggaaagt

SEQ ID NO: 8580 - DNA, 146 bp, synthetic construct
  source 1..146: mol_type = other DNA
tctttccattacgcttctttccattgccgcttctttccattgcttttctttccattgatcttctttccattacgcttctttccattgccgcttctttccattgcttttctttccattgatcttctttccattacgcttctttccat

SEQ ID NO: 8581 - DNA, 146 bp, synthetic construct
  source 1..146: mol_type = other DNA
atggaaagatacgctatggaaagatgccgctatggaaagatgctttatggaaagatgatctatggaaagatacgctatggaaagatgccgctatggaaagatgctttatggaaagatgatctatggaaagatacgctatggaaaga

SEQ ID NO: 8582 - DNA, 146 bp, synthetic construct
  source 1..146: mol_type = other DNA
tctttccgttacgcttctttccgttgccgcttctttccgttgcttttctttccgttgatcttctttccgttacgcttctttccgttgccgcttctttccgttgcttttctttccgttgatcttctttccgttacgcttctttccgt

SEQ ID NO: 8583 - DNA, 146 bp, synthetic construct
  source 1..146: mol_type = other DNA
acggaaagatacgctacggaaagatgccgctacggaaagatgctttacggaaagatgatctacggaaagatacgctacggaaagatgccgctacggaaagatgctttacggaaagatgatctacggaaagatacgctacggaaaga

SEQ ID NO: 8584 - DNA, 146 bp, synthetic construct
  source 1..146: mol_type = other DNA
atataggggtacgctatataggggtgccgctatataggggtgctttatataggggtgatctatataggggtacgctatataggggtgccgctatataggggtgctttatataggggtgatctatataggggtacgctatatagggg

SEQ ID NO: 8585 - DNA, 146 bp, synthetic construct
  source 1..146: mol_type = other DNA
cccctatattacgctcccctatattgccgctcccctatattgctttcccctatattgatctcccctatattacgctcccctatattgccgctcccctatattgctttcccctatattgatctcccctatattacgctcccctatat

SEQ ID NO: 8586 - DNA, 146 bp, synthetic construct
  source 1..146: mol_type = other DNA
ctataggggtacgctctataggggtgccgctctataggggtgctttctataggggtgatctctataggggtacgctctataggggtgccgctctataggggtgctttctataggggtgatctctataggggtacgctctatagggg

SEQ ID NO: 8587 - DNA, 146 bp, synthetic construct
  source 1..146: mol_type = other DNA
cccctatagtacgctcccctatagtgccgctcccctatagtgctttcccctatagtgatctcccctatagtacgctcccctatagtgccgctcccctatagtgctttcccctatagtgatctcccctatagtacgctcccctatag

SEQ ID NO: 8588 - DNA, 149 bp, synthetic construct
  source 1..149: mol_type = other DNA
aatgacgtcattgccgctaatgacgtcattgctttaatgacgtcattgatctaatgacgtcattacgctaatgacgtcattgccgctaatgacgtcattgctttaatgacgtcattgatctaatgacgtcattacgctaatgacgtcat

SEQ ID NO: 8589 - DNA, 149 bp, synthetic construct
  source 1..149: mol_type = other DNA
atgacgtcatttgccgctatgacgtcatttgctttatgacgtcatttgatctatgacgtcatttacgctatgacgtcatttgccgctatgacgtcatttgctttatgacgtcatttgatctatgacgtcatttacgctatgacgtcatt

SEQ ID NO: 8590 - DNA, 149 bp, synthetic construct
  source 1..149: mol_type = other DNA
agtgacgtcattgccgctagtgacgtcattgctttagtgacgtcattgatctagtgacgtcattacgctagtgacgtcattgccgctagtgacgtcattgctttagtgacgtcattgatctagtgacgtcattacgctagtgacgtcat

SEQ ID NO: 8591 - DNA, 149 bp, synthetic construct
  source 1..149: mol_type = other DNA
atgacgtcacttgccgctatgacgtcacttgctttatgacgtcacttgatctatgacgtcacttacgctatgacgtcacttgccgctatgacgtcacttgctttatgacgtcacttgatctatgacgtcacttacgctatgacgtcact

SEQ ID NO: 8592 - DNA, 149 bp, synthetic construct; identical to SEQ ID NO: 5954
  source 1..149: mol_type = other DNA

SEQ ID NO: 8593 - DNA, 149 bp, synthetic construct; identical to SEQ ID NO: 5955
  source 1..149: mol_type = other DNA

SEQ ID NO: 8594 - DNA, 149 bp, synthetic construct; identical to SEQ ID NO: 5958
  source 1..149: mol_type = other DNA

SEQ ID NO: 8595 - DNA, 149 bp, synthetic construct; identical to SEQ ID NO: 5959
  source 1..149: mol_type = other DNA

SEQ ID NO: 8596 - DNA, 139 bp, synthetic construct
  source 1..139: mol_type = other DNA
ggtttattgatctggtttattacgctggtttattgccgctggtttattgctttggtttattgatctggtttattacgctggtttattgccgctggtttattgctttggtttattgatctggtttattacgctggtttat

SEQ ID NO: 8597 - DNA, 139 bp, synthetic construct
  source 1..139: mol_type = other DNA
ataaacctgatctataaacctacgctataaacctgccgctataaacctgctttataaacctgatctataaacctacgctataaacctgccgctataaacctgctttataaacctgatctataaacctacgctataaacc

SEQ ID NO: 8598 - DNA, 139 bp, synthetic construct
  source 1..139: mol_type = other DNA
ggtttcttgatctggtttcttacgctggtttcttgccgctggtttcttgctttggtttcttgatctggtttcttacgctggtttcttgccgctggtttcttgctttggtttcttgatctggtttcttacgctggtttct

SEQ ID NO: 8599 - DNA, 139 bp, synthetic construct
  source 1..139: mol_type = other DNA
agaaacctgatctagaaacctacgctagaaacctgccgctagaaacctgctttagaaacctgatctagaaacctacgctagaaacctgccgctagaaacctgctttagaaacctgatctagaaacctacgctagaaacc

SEQ ID NO: 8600 - DNA, 146 bp, synthetic construct
  source 1..146: mol_type = other DNA
agtaaacaatacgctagtaaacaatgccgctagtaaacaatgctttagtaaacaatgatctagtaaacaatacgctagtaaacaatgccgctagtaaacaatgctttagtaaacaatgatctagtaaacaatacgctagtaaacaa

SEQ ID NO: 8601 - DNA, 146 bp, synthetic construct
  source 1..146: mol_type = other DNA
ttgtttacttacgctttgtttacttgccgctttgtttacttgctttttgtttacttgatctttgtttacttacgctttgtttacttgccgctttgtttacttgctttttgtttacttgatctttgtttacttacgctttgtttact

SEQ ID NO: 8602 - DNA, 146 bp, synthetic construct
  source 1..146: mol_type = other DNA
agtaaacagtacgctagtaaacagtgccgctagtaaacagtgctttagtaaacagtgatctagtaaacagtacgctagtaaacagtgccgctagtaaacagtgctttagtaaacagtgatctagtaaacagtacgctagtaaacag

SEQ ID NO: 8603 - DNA, 146 bp, synthetic construct
  source 1..146: mol_type = other DNA
ctgtttacttacgctctgtttacttgccgctctgtttacttgctttctgtttacttgatctctgtttacttacgctctgtttacttgccgctctgtttacttgctttctgtttacttgatctctgtttacttacgctctgtttact

SEQ ID NO: 8604 - DNA, 146 bp, synthetic construct
  source 1..146: mol_type = other DNA
tgtaaacaatacgcttgtaaacaatgccgcttgtaaacaatgcttttgtaaacaatgatcttgtaaacaatacgcttgtaaacaatgccgcttgtaaacaatgcttttgtaaacaatgatcttgtaaacaatacgcttgtaaacaa

SEQ ID NO: 8605 - DNA, 146 bp, synthetic construct
  source 1..146: mol_type = other DNA
ttgtttacatacgctttgtttacatgccgctttgtttacatgctttttgtttacatgatctttgtttacatacgctttgtttacatgccgctttgtttacatgctttttgtttacatgatctttgtttacatacgctttgtttaca

SEQ ID NO: 8606 - DNA, 146 bp, synthetic construct
  source 1..146: mol_type = other DNA
tgtaaacagtacgcttgtaaacagtgccgcttgtaaacagtgcttttgtaaacagtgatcttgtaaacagtacgcttgtaaacagtgccgcttgtaaacagtgcttttgtaaacagtgatcttgtaaacagtacgcttgtaaacag

SEQ ID NO: 8607 - DNA, 146 bp, synthetic construct
  source 1..146: mol_type = other DNA
ctgtttacatacgctctgtttacatgccgctctgtttacatgctttctgtttacatgatctctgtttacatacgctctgtttacatgccgctctgtttacatgctttctgtttacatgatctctgtttacatacgctctgtttaca

SEQ ID NO: 8608 - DNA, 140 bp, synthetic construct
  source 1..140: mol_type = other DNA
accggaagtgtgccgctaccggaagtgtgctttaccggaagtgtgatctaccggaagtgtacgctaccggaagtgtgccgctaccggaagtgtgctttaccggaagtgtgatctaccggaagtgtacgctaccggaagtg

SEQ ID NO: 8609 - DNA, 140 bp, synthetic construct
  source 1..140: mol_type = other DNA
cacttccggttgccgctcacttccggttgctttcacttccggttgatctcacttccggttacgctcacttccggttgccgctcacttccggttgctttcacttccggttgatctcacttccggttacgctcacttccggt

SEQ ID NO: 8610 - DNA, 140 bp, synthetic construct
  source 1..140: mol_type = other DNA
gccggaagtgtgccgctgccggaagtgtgctttgccggaagtgtgatctgccggaagtgtacgctgccggaagtgtgccgctgccggaagtgtgctttgccggaagtgtgatctgccggaagtgtacgctgccggaagtg

SEQ ID NO: 8611 - DNA, 140 bp, synthetic construct
  source 1..140: mol_type = other DNA
cacttccggctgccgctcacttccggctgctttcacttccggctgatctcacttccggctacgctcacttccggctgccgctcacttccggctgctttcacttccggctgatctcacttccggctacgctcacttccggc

SEQ ID NO: 8612 - DNA, 136 bp, synthetic construct
  source 1..136: mol_type = other DNA
acagctgctacgctacagctgctgccgctacagctgctgctttacagctgctgatctacagctgctacgctacagctgctgccgctacagctgctgctttacagctgctgatctacagctgctacgctacagctgc

SEQ ID NO: 8613 - DNA, 136 bp, synthetic construct
  source 1..136: mol_type = other DNA
gcagctgttacgctgcagctgttgccgctgcagctgttgctttgcagctgttgatctgcagctgttacgctgcagctgttgccgctgcagctgttgctttgcagctgttgatctgcagctgttacgctgcagctgt

SEQ ID NO: 8614 - DNA, 136 bp, synthetic construct
  source 1..136: mol_type = other DNA
acagctgttacgctacagctgttgccgctacagctgttgctttacagctgttgatctacagctgttacgctacagctgttgccgctacagctgttgctttacagctgttgatctacagctgttacgctacagctgt

SEQ ID NO: 8615 - DNA, 136 bp, synthetic construct; identical to SEQ ID NO: 8614
  source 1..136: mol_type = other DNA

SEQ ID NO: 8616 - DNA, 136 bp, synthetic construct
  source 1..136: mol_type = other DNA
gcagctgctacgctgcagctgctgccgctgcagctgctgctttgcagctgctgatctgcagctgctacgctgcagctgctgccgctgcagctgctgctttgcagctgctgatctgcagctgctacgctgcagctgc

SEQ ID NO: 8617 - DNA, 136 bp, synthetic construct; identical to SEQ ID NO: 8616
  source 1..136: mol_type = other DNA

SEQ ID NO: 8618 - DNA, 136 bp, synthetic construct; identical to SEQ ID NO: 8613
  source 1..136: mol_type = other DNA

SEQ ID NO: 8619 - DNA, 136 bp, synthetic construct; identical to SEQ ID NO: 8612
  source 1..136: mol_type = other DNA

SEQ ID NO: 8620 - DNA, 140 bp, synthetic construct
  source 1..140: mol_type = other DNA
agcaggaagttgccgctagcaggaagttgctttagcaggaagttgatctagcaggaagttacgctagcaggaagttgccgctagcaggaagttgctttagcaggaagttgatctagcaggaagttacgctagcaggaagt

SEQ ID NO: 8621 - DNA, 140 bp, synthetic construct
  source 1..140: mol_type = other DNA
acttcctgcttgccgctacttcctgcttgctttacttcctgcttgatctacttcctgcttacgctacttcctgcttgccgctacttcctgcttgctttacttcctgcttgatctacttcctgcttacgctacttcctgct

SEQ ID NO: 8622 - DNA, 140 bp, synthetic construct
  source 1..140: mol_type = other DNA
acatcctggttgccgctacatcctggttgctttacatcctggttgatctacatcctggttacgctacatcctggttgccgctacatcctggttgctttacatcctggttgatctacatcctggttacgctacatcctggt

SEQ ID NO: 8623 - DNA, 140 bp, synthetic construct
  source 1..140: mol_type = other DNA
accaggatgttgccgctaccaggatgttgctttaccaggatgttgatctaccaggatgttacgctaccaggatgttgccgctaccaggatgttgctttaccaggatgttgatctaccaggatgttacgctaccaggatgt

SEQ ID NO: 8624 - DNA, 140 bp, synthetic construct
  source 1..140: mol_type = other DNA
aacaggaagttgccgctaacaggaagttgctttaacaggaagttgatctaacaggaagttacgctaacaggaagttgccgctaacaggaagttgctttaacaggaagttgatctaacaggaagttacgctaacaggaagt

SEQ ID NO: 8625 - DNA, 140 bp, synthetic construct
  source 1..140: mol_type = other DNA
acttcctgtttgccgctacttcctgtttgctttacttcctgtttgatctacttcctgtttacgctacttcctgtttgccgctacttcctgtttgctttacttcctgtttgatctacttcctgtttacgctacttcctgtt

SEQ ID NO: 8626 - DNA, 140 bp, synthetic construct
  source 1..140: mol_type = other DNA
accaggaagttgccgctaccaggaagttgctttaccaggaagttgatctaccaggaagttacgctaccaggaagttgccgctaccaggaagttgctttaccaggaagttgatctaccaggaagttacgctaccaggaagt

SEQ ID NO: 8627 - DNA, 140 bp, synthetic construct
  source 1..140: mol_type = other DNA
acttcctggttgccgctacttcctggttgctttacttcctggttgatctacttcctggttacgctacttcctggttgccgctacttcctggttgctttacttcctggttgatctacttcctggttacgctacttcctggt

SEQ ID NO: 8628 - DNA, 140 bp, synthetic construct; identical to SEQ ID NO: 8620
  source 1..140: mol_type = other DNA

SEQ ID NO: 8629 - DNA, 140 bp, synthetic construct; identical to SEQ ID NO: 8621
  source 1..140: mol_type = other DNA

SEQ ID NO: 8630 - DNA, 139 bp, synthetic construct
  source 1..139: mol_type = other DNA
tggtacattccatgcttttggtacattccatgatcttggtacattccatacgcttggtacattccatgccgcttggtacattccatgcttttggtacattccatgatcttggtacattccatacgcttggtacattcca

SEQ ID NO: 8631 - DNA, 139 bp, synthetic construct
  source 1..139: mol_type = other DNA
tggaatgtaccatgcttttggaatgtaccatgatcttggaatgtaccatacgcttggaatgtaccatgccgcttggaatgtaccatgcttttggaatgtaccatgatcttggaatgtaccatacgcttggaatgtacca

SEQ ID NO: 8632 - DNA, 140 bp, synthetic construct
  source 1..140: mol_type = other DNA
gggatattcctgccgctgggatattcctgctttgggatattcctgatctgggatattcctacgctgggatattcctgccgctgggatattcctgctttgggatattcctgatctgggatattcctacgctgggatattcc

SEQ ID NO: 8633 - DNA, 140 bp, synthetic construct
  source 1..140: mol_type = other DNA
ggaatatccctgccgctggaatatccctgctttggaatatccctgatctggaatatccctacgctggaatatccctgccgctggaatatccctgctttggaatatccctgatctggaatatccctacgctggaatatccc

SEQ ID NO: 8634 - DNA, 140 bp, synthetic construct
  source 1..140: mol_type = other DNA
gggattttcctgccgctgggattttcctgctttgggattttcctgatctgggattttcctacgctgggattttcctgccgctgggattttcctgctttgggattttcctgatctgggattttcctacgctgggattttcc

SEQ ID NO: 8635 - DNA, 140 bp, synthetic construct
  source 1..140: mol_type = other DNA
ggaaaatccctgccgctggaaaatccctgctttggaaaatccctgatctggaaaatccctacgctggaaaatccctgccgctggaaaatccctgctttggaaaatccctgatctggaaaatccctacgctggaaaatccc

SEQ ID NO: 8636 - DNA, 140 bp, synthetic construct
  source 1..140: mol_type = other DNA
ggggtattcctgccgctggggtattcctgctttggggtattcctgatctggggtattcctacgctggggtattcctgccgctggggtattcctgctttggggtattcctgatctggggtattcctacgctggggtattcc

SEQ ID NO: 8637 - DNA, 140 bp, synthetic construct
  source 1..140: mol_type = other DNA
ggaatacccctgccgctggaatacccctgctttggaatacccctgatctggaatacccctacgctggaatacccctgccgctggaatacccctgctttggaatacccctgatctggaatacccctacgctggaatacccc

SEQ ID NO: 8638 - DNA, 140 bp, synthetic construct
  source 1..140: mol_type = other DNA
ggggttttcctgccgctggggttttcctgctttggggttttcctgatctggggttttcctacgctggggttttcctgccgctggggttttcctgctttggggttttcctgatctggggttttcctacgctggggttttcc

SEQ ID NO: 8639 - DNA, 140 bp, synthetic construct
  source 1..140: mol_type = other DNA
ggaaaacccctgccgctggaaaacccctgctttggaaaacccctgatctggaaaacccctacgctggaaaacccctgccgctggaaaacccctgctttggaaaacccctgatctggaaaacccctacgctggaaaacccc

SEQ ID NO: 8640 - DNA, 140 bp, synthetic construct
  source 1..140: mol_type = other DNA
cggatattcctgccgctcggatattcctgctttcggatattcctgatctcggatattcctacgctcggatattcctgccgctcggatattcctgctttcggatattcctgatctcggatattcctacgctcggatattcc

SEQ ID NO: 8641 - DNA, 140 bp, synthetic construct
  source 1..140: mol_type = other DNA
ggaatatccgtgccgctggaatatccgtgctttggaatatccgtgatctggaatatccgtacgctggaatatccgtgccgctggaatatccgtgctttggaatatccgtgatctggaatatccgtacgctggaatatccg

SEQ ID NO: 8642 - DNA, 140 bp, synthetic construct
  source 1..140: mol_type = other DNA
cggattttcctgccgctcggattttcctgctttcggattttcctgatctcggattttcctacgctcggattttcctgccgctcggattttcctgctttcggattttcctgatctcggattttcctacgctcggattttcc

SEQ ID NO: 8643 - DNA, 140 bp, synthetic construct
  source 1..140: mol_type = other DNA
ggaaaatccgtgccgctggaaaatccgtgctttggaaaatccgtgatctggaaaatccgtacgctggaaaatccgtgccgctggaaaatccgtgctttggaaaatccgtgatctggaaaatccgtacgctggaaaatccg

SEQ ID NO: 8644 - DNA, 140 bp, synthetic construct
  source 1..140: mol_type = other DNA
cgggtattcctgccgctcgggtattcctgctttcgggtattcctgatctcgggtattcctacgctcgggtattcctgccgctcgggtattcctgctttcgggtattcctgatctcgggtattcctacgctcgggtattcc

SEQ ID NO: 8645 - DNA, 140 bp, synthetic construct
  source 1..140: mol_type = other DNA
ggaatacccgtgccgctggaatacccgtgctttggaatacccgtgatctggaatacccgtacgctggaatacccgtgccgctggaatacccgtgctttggaatacccgtgatctggaatacccgtacgctggaatacccg

SEQ ID NO: 8646 - DNA, 140 bp, synthetic construct
  source 1..140: mol_type = other DNA
cgggttttcctgccgctcgggttttcctgctttcgggttttcctgatctcgggttttcctacgctcgggttttcctgccgctcgggttttcctgctttcgggttttcctgatctcgggttttcctacgctcgggttttcc

SEQ ID NO: 8647 - DNA, 140 bp, synthetic construct
  source 1..140: mol_type = other DNA
ggaaaacccgtgccgctggaaaacccgtgctttggaaaacccgtgatctggaaaacccgtacgctggaaaacccgtgccgctggaaaacccgtgctttggaaaacccgtgatctggaaaacccgtacgctggaaaacccg

SEQ ID NO: 8648 - DNA, 139 bp, synthetic construct
  source 1..139: mol_type = other DNA
ctgggcatctgcagcccctacgctctgggcatctgcagcccctgccgctctgggcatctgcagcccctgctttctgggcatctgcagcccctgatctctgggcatctgcagcccctacgctctgggcatctgcagcccc

SEQ ID NO: 8649 - DNA, 139 bp, synthetic construct
  source 1..139: mol_type = other DNA
ggggctgcagatgcccagtacgctggggctgcagatgcccagtgccgctggggctgcagatgcccagtgctttggggctgcagatgcccagtgatctggggctgcagatgcccagtacgctggggctgcagatgcccag

SEQ ID NO: 8650 - DNA, 139 bp, synthetic construct
  source 1..139: mol_type = other DNA
ctgggcatctgcagcccttacgctctgggcatctgcagcccttgccgctctgggcatctgcagcccttgctttctgggcatctgcagcccttgatctctgggcatctgcagcccttacgctctgggcatctgcagccct

SEQ ID NO: 8651 - DNA, 139 bp, synthetic construct
  source 1..139: mol_type = other DNA
agggctgcagatgcccagtacgctagggctgcagatgcccagtgccgctagggctgcagatgcccagtgctttagggctgcagatgcccagtgatctagggctgcagatgcccagtacgctagggctgcagatgcccag

SEQ ID NO: 8652 - DNA, 139 bp, synthetic construct
  source 1..139: mol_type = other DNA
ctgggtatctgcagcccctacgctctgggtatctgcagcccctgccgctctgggtatctgcagcccctgctttctgggtatctgcagcccctgatctctgggtatctgcagcccctacgctctgggtatctgcagcccc

SEQ ID NO: 8653 - DNA, 139 bp, synthetic construct
  source 1..139: mol_type = other DNA
ggggctgcagatacccagtacgctggggctgcagatacccagtgccgctggggctgcagatacccagtgctttggggctgcagatacccagtgatctggggctgcagatacccagtacgctggggctgcagatacccag

SEQ ID NO: 8654 - DNA, 139 bp, synthetic construct
  source 1..139: mol_type = other DNA
ctgggtatctgcagcccttacgctctgggtatctgcagcccttgccgctctgggtatctgcagcccttgctttctgggtatctgcagcccttgatctctgggtatctgcagcccttacgctctgggtatctgcagccct

SEQ ID NO: 8655 - DNA, 139 bp, synthetic construct
  source 1..139: mol_type = other DNA
agggctgcagatacccagtacgctagggctgcagatacccagtgccgctagggctgcagatacccagtgctttagggctgcagatacccagtgatctagggctgcagatacccagtacgctagggctgcagatacccag

SEQ ID NO: 8656 - DNA, 139 bp, synthetic construct
  source 1..139: mol_type = other DNA
cttggcatctgcagcccctacgctcttggcatctgcagcccctgccgctcttggcatctgcagcccctgctttcttggcatctgcagcccctgatctcttggcatctgcagcccctacgctcttggcatctgcagcccc

SEQ ID NO: 8657 - DNA, 139 bp, synthetic construct
  source 1..139: mol_type = other DNA
ggggctgcagatgccaagtacgctggggctgcagatgccaagtgccgctggggctgcagatgccaagtgctttggggctgcagatgccaagtgatctggggctgcagatgccaagtacgctggggctgcagatgccaag

SEQ ID NO: 8658 - DNA, 139 bp, synthetic construct
  source 1..139: mol_type = other DNA
cttggcatctgcagcccttacgctcttggcatctgcagcccttgccgctcttggcatctgcagcccttgctttcttggcatctgcagcccttgatctcttggcatctgcagcccttacgctcttggcatctgcagccct

SEQ ID NO: 8659 - DNA, 139 bp, synthetic construct
  source 1..139: mol_type = other DNA
agggctgcagatgccaagtacgctagggctgcagatgccaagtgccgctagggctgcagatgccaagtgctttagggctgcagatgccaagtgatctagggctgcagatgccaagtacgctagggctgcagatgccaag

SEQ ID NO: 8660 - DNA, 139 bp, synthetic construct
  source 1..139: mol_type = other DNA
cttggtatctgcagcccctacgctcttggtatctgcagcccctgccgctcttggtatctgcagcccctgctttcttggtatctgcagcccctgatctcttggtatctgcagcccctacgctcttggtatctgcagcccc

SEQ ID NO: 8661 - DNA, 139 bp, synthetic construct
  source 1..139: mol_type = other DNA
ggggctgcagataccaagtacgctggggctgcagataccaagtgccgctggggctgcagataccaagtgctttggggctgcagataccaagtgatctggggctgcagataccaagtacgctggggctgcagataccaag

SEQ ID NO: 8662 - DNA, 139 bp, synthetic construct
  source 1..139: mol_type = other DNA
cttggtatctgcagcccttacgctcttggtatctgcagcccttgccgctcttggtatctgcagcccttgctttcttggtatctgcagcccttgatctcttggtatctgcagcccttacgctcttggtatctgcagccct

SEQ ID NO: 8663 - DNA, 139 bp, synthetic construct
  source 1..139: mol_type = other DNA
agggctgcagataccaagtacgctagggctgcagataccaagtgccgctagggctgcagataccaagtgctttagggctgcagataccaagtgatctagggctgcagataccaagtacgctagggctgcagataccaag

SEQ ID NO: 8664 - DNA, 139 bp, synthetic construct
  source 1..139: mol_type = other DNA
ttgggcatctgcagcccctacgctttgggcatctgcagcccctgccgctttgggcatctgcagcccctgctttttgggcatctgcagcccctgatctttgggcatctgcagcccctacgctttgggcatctgcagcccc

SEQ ID NO: 8665 - DNA, 139 bp, synthetic construct
  source 1..139: mol_type = other DNA
ggggctgcagatgcccaatacgctggggctgcagatgcccaatgccgctggggctgcagatgcccaatgctttggggctgcagatgcccaatgatctggggctgcagatgcccaatacgctggggctgcagatgcccaa

SEQ ID NO: 8666 - DNA, 139 bp, synthetic construct
  source 1..139: mol_type = other DNA
ttgggcatctgcagcccttacgctttgggcatctgcagcccttgccgctttgggcatctgcagcccttgctttttgggcatctgcagcccttgatctttgggcatctgcagcccttacgctttgggcatctgcagccct

SEQ ID NO: 8667 - DNA, 139 bp, synthetic construct
  source 1..139: mol_type = other DNA
agggctgcagatgcccaatacgctagggctgcagatgcccaatgccgctagggctgcagatgcccaatgctttagggctgcagatgcccaatgatctagggctgcagatgcccaatacgctagggctgcagatgcccaa

SEQ ID NO: 8668 - DNA, 139 bp, synthetic construct
  source 1..139: mol_type = other DNA
ttgggtatctgcagcccctacgctttgggtatctgcagcccctgccgctttgggtatctgcagcccctgctttttgggtatctgcagcccctgatctttgggtatctgcagcccctacgctttgggtatctgcagcccc

SEQ ID NO: 8669 - DNA, 139 bp, synthetic construct
  source 1..139: mol_type = other DNA
ggggctgcagatacccaatacgctggggctgcagatacccaatgccgctggggctgcagatacccaatgctttggggctgcagatacccaatgatctggggctgcagatacccaatacgctggggctgcagatacccaa

SEQ ID NO: 8670 - DNA, 139 bp, synthetic construct
  source 1..139: mol_type = other DNA
ttgggtatctgcagcccttacgctttgggtatctgcagcccttgccgctttgggtatctgcagcccttgctttttgggtatctgcagcccttgatctttgggtatctgcagcccttacgctttgggtatctgcagccct

SEQ ID NO: 8671 - DNA, 139 bp, synthetic construct
  source 1..139: mol_type = other DNA
agggctgcagatacccaatacgctagggctgcagatacccaatgccgctagggctgcagatacccaatgctttagggctgcagatacccaatgatctagggctgcagatacccaatacgctagggctgcagatacccaa

SEQ ID NO: 8672 - DNA, 139 bp, synthetic construct
  source 1..139: mol_type = other DNA
tttggcatctgcagcccctacgcttttggcatctgcagcccctgccgcttttggcatctgcagcccctgcttttttggcatctgcagcccctgatcttttggcatctgcagcccctacgcttttggcatctgcagcccc

SEQ ID NO: 8673 - DNA, 139 bp, synthetic construct
  source 1..139: mol_type = other DNA
ggggctgcagatgccaaatacgctggggctgcagatgccaaatgccgctggggctgcagatgccaaatgctttggggctgcagatgccaaatgatctggggctgcagatgccaaatacgctggggctgcagatgccaaa

SEQ ID NO: 8674 - DNA, 139 bp, synthetic construct
  source 1..139: mol_type = other DNA
tttggcatctgcagcccttacgcttttggcatctgcagcccttgccgcttttggcatctgcagcccttgcttttttggcatctgcagcccttgatcttttggcatctgcagcccttacgcttttggcatctgcagccct

SEQ ID NO: 8675 - DNA, 139 bp, synthetic construct
  source 1..139: mol_type = other DNA
agggctgcagatgccaaatacgctagggctgcagatgccaaatgccgctagggctgcagatgccaaatgctttagggctgcagatgccaaatgatctagggctgcagatgccaaatacgctagggctgcagatgccaaa

SEQ ID NO: 8676 - DNA, 139 bp, synthetic construct
  source 1..139: mol_type = other DNA
tttggtatctgcagcccctacgcttttggtatctgcagcccctgccgcttttggtatctgcagcccctgcttttttggtatctgcagcccctgatcttttggtatctgcagcccctacgcttttggtatctgcagcccc

SEQ ID NO: 8677 - DNA, 139 bp, synthetic construct
  source 1..139: mol_type = other DNA
ggggctgcagataccaaatacgctggggctgcagataccaaatgccgctggggctgcagataccaaatgctttggggctgcagataccaaatgatctggggctgcagataccaaatacgctggggctgcagataccaaa

SEQ ID NO: 8678 - DNA, 139 bp, synthetic construct
  source 1..139: mol_type = other DNA
tttggtatctgcagcccttacgcttttggtatctgcagcccttgccgcttttggtatctgcagcccttgcttttttggtatctgcagcccttgatcttttggtatctgcagcccttacgcttttggtatctgcagccct

SEQ ID NO: 8679 - DNA, 139 bp, synthetic construct
  source 1..139: mol_type = other DNA
agggctgcagataccaaatacgctagggctgcagataccaaatgccgctagggctgcagataccaaatgctttagggctgcagataccaaatgatctagggctgcagataccaaatacgctagggctgcagataccaaa

SEQ ID NO: 8680 - DNA, 130 bp, synthetic construct
  source 1..130: mol_type = other DNA
aatacagccctagactctccctgccgctaatacagccctagactctccctgctttaatacagccctagactctccctgatctaatacagccctagactctccctacgctaatacagccctagactctccc

SEQ ID NO: 8681 - DNA, 130 bp, synthetic construct
  source 1..130: mol_type = other DNA
gggagagtctagggctgtatttgccgctgggagagtctagggctgtatttgctttgggagagtctagggctgtatttgatctgggagagtctagggctgtatttacgctgggagagtctagggctgtatt

SEQ ID NO: 8682 - DNA, 130 bp, synthetic construct
  source 1..130: mol_type = other DNA
aatacagccctagactctccttgccgctaatacagccctagactctccttgctttaatacagccctagactctccttgatctaatacagccctagactctccttacgctaatacagccctagactctcct

SEQ ID NO: 8683 - DNA, 130 bp, synthetic construct
  source 1..130: mol_type = other DNA
aggagagtctagggctgtatttgccgctaggagagtctagggctgtatttgctttaggagagtctagggctgtatttgatctaggagagtctagggctgtatttacgctaggagagtctagggctgtatt

SEQ ID NO: 8684 - DNA, 130 bp, synthetic construct
  source 1..130: mol_type = other DNA
aatacagccctatactctccctgccgctaatacagccctatactctccctgctttaatacagccctatactctccctgatctaatacagccctatactctccctacgctaatacagccctatactctccc

SEQ ID NO: 8685 - DNA, 130 bp, synthetic construct
  source 1..130: mol_type = other DNA
gggagagtatagggctgtatttgccgctgggagagtatagggctgtatttgctttgggagagtatagggctgtatttgatctgggagagtatagggctgtatttacgctgggagagtatagggctgtatt

SEQ ID NO: 8686 - DNA, 130 bp, synthetic construct
  source 1..130: mol_type = other DNA
aatacagccctatactctccttgccgctaatacagccctatactctccttgctttaatacagccctatactctccttgatctaatacagccctatactctccttacgctaatacagccctatactctcct

SEQ ID NO: 8687 - DNA, 130 bp, synthetic construct
  source 1..130: mol_type = other DNA
aggagagtatagggctgtatttgccgctaggagagtatagggctgtatttgctttaggagagtatagggctgtatttgatctaggagagtatagggctgtatttacgctaggagagtatagggctgtatt

SEQ ID NO: 8688 - DNA, 130 bp, synthetic construct
  source 1..130: mol_type = other DNA
aatccagccctagactctccctgccgctaatccagccctagactctccctgctttaatccagccctagactctccctgatctaatccagccctagactctccctacgctaatccagccctagactctccc

SEQ ID NO: 8689 - DNA, 130 bp, synthetic construct
  source 1..130: mol_type = other DNA
gggagagtctagggctggatttgccgctgggagagtctagggctggatttgctttgggagagtctagggctggatttgatctgggagagtctagggctggatttacgctgggagagtctagggctggatt

SEQ ID NO: 8690 - DNA, 130 bp, synthetic construct
  source 1..130: mol_type = other DNA
aatccagccctagactctccttgccgctaatccagccctagactctccttgctttaatccagccctagactctccttgatctaatccagccctagactctccttacgctaatccagccctagactctcct

SEQ ID NO: 8691 - DNA, 130 bp, synthetic construct
  source 1..130: mol_type = other DNA
aggagagtctagggctggatttgccgctaggagagtctagggctggatttgctttaggagagtctagggctggatttgatctaggagagtctagggctggatttacgctaggagagtctagggctggatt

SEQ ID NO: 8692 - DNA, 130 bp, synthetic construct
  source 1..130: mol_type = other DNA
aatccagccctatactctccctgccgctaatccagccctatactctccctgctttaatccagccctatactctccctgatctaatccagccctatactctccctacgctaatccagccctatactctccc

SEQ ID NO: 8693 - DNA, 130 bp, synthetic construct
  source 1..130: mol_type = other DNA
gggagagtatagggctggatttgccgctgggagagtatagggctggatttgctttgggagagtatagggctggatttgatctgggagagtatagggctggatttacgctgggagagtatagggctggatt

SEQ ID NO: 8694 - DNA, 130 bp, synthetic construct
  source 1..130: mol_type = other DNA
aatccagccctatactctccttgccgctaatccagccctatactctccttgctttaatccagccctatactctccttgatctaatccagccctatactctccttacgctaatccagccctatactctcct

SEQ ID NO: 8695 - DNA, 130 bp, synthetic construct
  source 1..130: mol_type = other DNA
aggagagtatagggctggatttgccgctaggagagtatagggctggatttgctttaggagagtatagggctggatttgatctaggagagtatagggctggatttacgctaggagagtatagggctggatt

SEQ ID NO: 8696 - DNA, 130 bp, synthetic construct
  source 1..130: mol_type = other DNA
attacagccctagactctccctgccgctattacagccctagactctccctgctttattacagccctagactctccctgatctattacagccctagactctccctacgctattacagccctagactctccc

SEQ ID NO: 8697 - DNA, 130 bp, synthetic construct
  source 1..130: mol_type = other DNA
gggagagtctagggctgtaattgccgctgggagagtctagggctgtaattgctttgggagagtctagggctgtaattgatctgggagagtctagggctgtaattacgctgggagagtctagggctgtaat

SEQ ID NO: 8698 - DNA, 130 bp, synthetic construct
  source 1..130: mol_type = other DNA
attacagccctagactctccttgccgctattacagccctagactctccttgctttattacagccctagactctccttgatctattacagccctagactctccttacgctattacagccctagactctcct

SEQ ID NO: 8699 - DNA, 130 bp, synthetic construct
  source 1..130: mol_type = other DNA
aggagagtctagggctgtaattgccgctaggagagtctagggctgtaattgctttaggagagtctagggctgtaattgatctaggagagtctagggctgtaattacgctaggagagtctagggctgtaat

SEQ ID NO: 8700 - DNA, 130 bp, synthetic construct
  source 1..130: mol_type = other DNA
attacagccctatactctccctgccgctattacagccctatactctccctgctttattacagccctatactctccctgatctattacagccctatactctccctacgctattacagccctatactctccc

SEQ ID NO: 8701 - DNA, 130 bp, synthetic construct
  source 1..130: mol_type = other DNA
gggagagtatagggctgtaattgccgctgggagagtatagggctgtaattgctttgggagagtatagggctgtaattgatctgggagagtatagggctgtaattacgctgggagagtatagggctgtaat

SEQ ID NO: 8702 - DNA, 130 bp, synthetic construct
  source 1..130: mol_type = other DNA
attacagccctatactctccttgccgctattacagccctatactctccttgctttattacagccctatactctccttgatctattacagccctatactctccttacgctattacagccctatactctcct

SEQ ID NO: 8703 - DNA, 130 bp, synthetic construct
  source 1..130: mol_type = other DNA
aggagagtatagggctgtaattgccgctaggagagtatagggctgtaattgctttaggagagtatagggctgtaattgatctaggagagtatagggctgtaattacgctaggagagtatagggctgtaat

SEQ ID NO: 8704 - DNA, 130 bp, synthetic construct
  source 1..130: mol_type = other DNA
attccagccctagactctccctgccgctattccagccctagactctccctgctttattccagccctagactctccctgatctattccagccctagactctccctacgctattccagccctagactctccc

SEQ ID NO: 8705 - DNA, 130 bp, synthetic construct
  source 1..130: mol_type = other DNA
gggagagtctagggctggaattgccgctgggagagtctagggctggaattgctttgggagagtctagggctggaattgatctgggagagtctagggctggaattacgctgggagagtctagggctggaat

SEQ ID NO: 8706 - DNA, 130 bp, synthetic construct
  source 1..130: mol_type = other DNA
attccagccctagactctccttgccgctattccagccctagactctccttgctttattccagccctagactctccttgatctattccagccctagactctccttacgctattccagccctagactctcct

SEQ ID NO: 8707 - DNA, 130 bp, synthetic construct
  source 1..130: mol_type = other DNA
aggagagtctagggctggaattgccgctaggagagtctagggctggaattgctttaggagagtctagggctggaattgatctaggagagtctagggctggaattacgctaggagagtctagggctggaat

SEQ ID NO: 8708 - DNA, 130 bp, synthetic construct
  source 1..130: mol_type = other DNA
attccagccctatactctccctgccgctattccagccctatactctccctgctttattccagccctatactctccctgatctattccagccctatactctccctacgctattccagccctatactctccc

SEQ ID NO: 8709 - DNA, 130 bp, synthetic construct
  source 1..130: mol_type = other DNA
gggagagtatagggctggaattgccgctgggagagtatagggctggaattgctttgggagagtatagggctggaattgatctgggagagtatagggctggaattacgctgggagagtatagggctggaat

SEQ ID NO: 8710 - DNA, 130 bp, synthetic construct
  source 1..130: mol_type = other DNA
attccagccctatactctccttgccgctattccagccctatactctccttgctttattccagccctatactctccttgatctattccagccctatactctccttacgctattccagccctatactctcct

SEQ ID NO: 8711 - DNA, 130 bp, synthetic construct
  source 1..130: mol_type = other DNA
aggagagtatagggctggaattgccgctaggagagtatagggctggaattgctttaggagagtatagggctggaattgatctaggagagtatagggctggaattacgctaggagagtatagggctggaat

SEQ ID NO: 8712 - DNA, 145 bp, synthetic construct
  source 1..145: mol_type = other DNA
agatgtcatgagagataagtacgctagatgtcatgagagataagtgccgctagatgtcatgagagataagtgctttagatgtcatgagagataagtgatctagatgtcatgagagataagtacgctagatgtcatgagagataag

SEQ ID NO: 8713 - DNA, 145 bp, synthetic construct
  source 1..145: mol_type = other DNA
cttatctctcatgacatcttacgctcttatctctcatgacatcttgccgctcttatctctcatgacatcttgctttcttatctctcatgacatcttgatctcttatctctcatgacatcttacgctcttatctctcatgacatct

SEQ ID NO: 8714 - DNA, 145 bp, synthetic construct
  source 1..145: mol_type = other DNA
agatgtcatgagagataactacgctagatgtcatgagagataactgccgctagatgtcatgagagataactgctttagatgtcatgagagataactgatctagatgtcatgagagataactacgctagatgtcatgagagataac

SEQ ID NO: 8715 - DNA, 145 bp, synthetic construct
  source 1..145: mol_type = other DNA
gttatctctcatgacatcttacgctgttatctctcatgacatcttgccgctgttatctctcatgacatcttgctttgttatctctcatgacatcttgatctgttatctctcatgacatcttacgctgttatctctcatgacatct

SEQ ID NO: 8716 - DNA, 145 bp, synthetic construct
  source 1..145: mol_type = other DNA
agatgtcatgacagataagtacgctagatgtcatgacagataagtgccgctagatgtcatgacagataagtgctttagatgtcatgacagataagtgatctagatgtcatgacagataagtacgctagatgtcatgacagataag

SEQ ID NO: 8717 - DNA, 145 bp, synthetic construct
  source 1..145: mol_type = other DNA
cttatctgtcatgacatcttacgctcttatctgtcatgacatcttgccgctcttatctgtcatgacatcttgctttcttatctgtcatgacatcttgatctcttatctgtcatgacatcttacgctcttatctgtcatgacatct

SEQ ID NO: 8718 - DNA, 145 bp, synthetic construct
  source 1..145: mol_type = other DNA
agatgtcatgacagataactacgctagatgtcatgacagataactgccgctagatgtcatgacagataactgctttagatgtcatgacagataactgatctagatgtcatgacagataactacgctagatgtcatgacagataac

SEQ ID NO: 8719 - DNA, 145 bp, synthetic construct
  source 1..145: mol_type = other DNA
gttatctgtcatgacatcttacgctgttatctgtcatgacatcttgccgctgttatctgtcatgacatcttgctttgttatctgtcatgacatcttgatctgttatctgtcatgacatcttacgctgttatctgtcatgacatct

SEQ ID NO: 8720 - DNA, 145 bp, synthetic construct
  source 1..145: mol_type = other DNA
agatgtcatgggagataagtacgctagatgtcatgggagataagtgccgctagatgtcatgggagataagtgctttagatgtcatgggagataagtgatctagatgtcatgggagataagtacgctagatgtcatgggagataag

SEQ ID NO: 8721 - DNA, 145 bp, synthetic construct
  source 1..145: mol_type = other DNA
cttatctcccatgacatcttacgctcttatctcccatgacatcttgccgctcttatctcccatgacatcttgctttcttatctcccatgacatcttgatctcttatctcccatgacatcttacgctcttatctcccatgacatct

SEQ ID NO: 8722 - DNA, 145 bp, synthetic construct
  source 1..145: mol_type = other DNA
agatgtcatgggagataactacgctagatgtcatgggagataactgccgctagatgtcatgggagataactgctttagatgtcatgggagataactgatctagatgtcatgggagataactacgctagatgtcatgggagataac

SEQ ID NO: 8723 - DNA, 145 bp, synthetic construct
  source 1..145: mol_type = other DNA
gttatctcccatgacatcttacgctgttatctcccatgacatcttgccgctgttatctcccatgacatcttgctttgttatctcccatgacatcttgatctgttatctcccatgacatcttacgctgttatctcccatgacatct

SEQ ID NO: 8724 - DNA, 145 bp, synthetic construct
  source 1..145: mol_type = other DNA
agatgtcatggcagataagtacgctagatgtcatggcagataagtgccgctagatgtcatggcagataagtgctttagatgtcatggcagataagtgatctagatgtcatggcagataagtacgctagatgtcatggcagataag

SEQ ID NO: 8725 - DNA, 145 bp, synthetic construct
  source 1..145: mol_type = other DNA
cttatctgccatgacatcttacgctcttatctgccatgacatcttgccgctcttatctgccatgacatcttgctttcttatctgccatgacatcttgatctcttatctgccatgacatcttacgctcttatctgccatgacatct

SEQ ID NO: 8726 - DNA, 145 bp, synthetic construct
  source 1..145: mol_type = other DNA
agatgtcatggcagataactacgctagatgtcatggcagataactgccgctagatgtcatggcagataactgctttagatgtcatggcagataactgatctagatgtcatggcagataactacgctagatgtcatggcagataac

SEQ ID NO: 8727 - DNA, 145 bp, synthetic construct
  source 1..145: mol_type = other DNA
gttatctgccatgacatcttacgctgttatctgccatgacatcttgccgctgttatctgccatgacatcttgctttgttatctgccatgacatcttgatctgttatctgccatgacatcttacgctgttatctgccatgacatct

SEQ ID NO: 8728 - DNA, 145 bp, synthetic construct
  source 1..145: mol_type = other DNA
agatgtcatgtgagataagtacgctagatgtcatgtgagataagtgccgctagatgtcatgtgagataagtgctttagatgtcatgtgagataagtgatctagatgtcatgtgagataagtacgctagatgtcatgtgagataag

SEQ ID NO: 8729 - DNA, 145 bp, synthetic construct
  source 1..145: mol_type = other DNA
cttatctcacatgacatcttacgctcttatctcacatgacatcttgccgctcttatctcacatgacatcttgctttcttatctcacatgacatcttgatctcttatctcacatgacatcttacgctcttatctcacatgacatct

SEQ ID NO: 8730 - DNA, 145 bp, synthetic construct
  source 1..145: mol_type = other DNA
agatgtcatgtgagataactacgctagatgtcatgtgagataactgccgctagatgtcatgtgagataactgctttagatgtcatgtgagataactgatctagatgtcatgtgagataactacgctagatgtcatgtgagataac

SEQ ID NO: 8731 - DNA, 145 bp, synthetic construct
  source 1..145: mol_type = other DNA
gttatctcacatgacatcttacgctgttatctcacatgacatcttgccgctgttatctcacatgacatcttgctttgttatctcacatgacatcttgatctgttatctcacatgacatcttacgctgttatctcacatgacatct

SEQ ID NO: 8732 - DNA, 145 bp, synthetic construct
  source 1..145: mol_type = other DNA
agatgtcatgtcagataagtacgctagatgtcatgtcagataagtgccgctagatgtcatgtcagataagtgctttagatgtcatgtcagataagtgatctagatgtcatgtcagataagtacgctagatgtcatgtcagataag

SEQ ID NO: 8733 - DNA, 145 bp, synthetic construct
  source 1..145: mol_type = other DNA
cttatctgacatgacatcttacgctcttatctgacatgacatcttgccgctcttatctgacatgacatcttgctttcttatctgacatgacatcttgatctcttatctgacatgacatcttacgctcttatctgacatgacatct

SEQ ID NO: 8734 - DNA, 145 bp, synthetic construct
  source 1..145: mol_type = other DNA
agatgtcatgtcagataactacgctagatgtcatgtcagataactgccgctagatgtcatgtcagataactgctttagatgtcatgtcagataactgatctagatgtcatgtcagataactacgctagatgtcatgtcagataac

SEQ ID NO: 8735 - DNA, 145 bp, synthetic construct
  source 1..145: mol_type = other DNA
gttatctgacatgacatcttacgctgttatctgacatgacatcttgccgctgttatctgacatgacatcttgctttgttatctgacatgacatcttgatctgttatctgacatgacatcttacgctgttatctgacatgacatct

SEQ ID NO: 8736 - DNA, 145 bp, synthetic construct
  source 1..145: mol_type = other DNA
agatgtcgtgagagataagtacgctagatgtcgtgagagataagtgccgctagatgtcgtgagagataagtgctttagatgtcgtgagagataagtgatctagatgtcgtgagagataagtacgctagatgtcgtgagagataag

SEQ ID NO: 8737 - DNA, 145 bp, synthetic construct
  source 1..145: mol_type = other DNA
cttatctctcacgacatcttacgctcttatctctcacgacatcttgccgctcttatctctcacgacatcttgctttcttatctctcacgacatcttgatctcttatctctcacgacatcttacgctcttatctctcacgacatct

SEQ ID NO: 8738 - DNA, 145 bp, synthetic construct
  source 1..145: mol_type = other DNA
agatgtcgtgagagataactacgctagatgtcgtgagagataactgccgctagatgtcgtgagagataactgctttagatgtcgtgagagataactgatctagatgtcgtgagagataactacgctagatgtcgtgagagataac

SEQ ID NO: 8739 - DNA, 145 bp, synthetic construct
  source 1..145: mol_type = other DNA
gttatctctcacgacatcttacgctgttatctctcacgacatcttgccgctgttatctctcacgacatcttgctttgttatctctcacgacatcttgatctgttatctctcacgacatcttacgctgttatctctcacgacatct

SEQ ID NO: 8740 - DNA, 145 bp, synthetic construct
  source 1..145: mol_type = other DNA
agatgtcgtgacagataagtacgctagatgtcgtgacagataagtgccgctagatgtcgtgacagataagtgctttagatgtcgtgacagataagtgatctagatgtcgtgacagataagtacgctagatgtcgtgacagataag

SEQ ID NO: 8741 - DNA, 145 bp, synthetic construct
  source 1..145: mol_type = other DNA
cttatctgtcacgacatcttacgctcttatctgtcacgacatcttgccgctcttatctgtcacgacatcttgctttcttatctgtcacgacatcttgatctcttatctgtcacgacatcttacgctcttatctgtcacgacatct

SEQ ID NO: 8742 - DNA, 145 bp, synthetic construct
  source 1..145: mol_type = other DNA
agatgtcgtgacagataactacgctagatgtcgtgacagataactgccgctagatgtcgtgacagataactgctttagatgtcgtgacagataactgatctagatgtcgtgacagataactacgctagatgtcgtgacagataac

SEQ ID NO: 8743 - DNA, 145 bp, synthetic construct
  source 1..145: mol_type = other DNA
gttatctgtcacgacatcttacgctgttatctgtcacgacatcttgccgctgttatctgtcacgacatcttgctttgttatctgtcacgacatcttgatctgttatctgtcacgacatcttacgctgttatctgtcacgacatct

SEQ ID NO: 8744 - DNA, 145 bp, synthetic construct
  source 1..145: mol_type = other DNA
agatgtcgtgggagataagtacgctagatgtcgtgggagataagtgccgctagatgtcgtgggagataagtgctttagatgtcgtgggagataagtgatctagatgtcgtgggagataagtacgctagatgtcgtgggagataag

SEQ ID NO: 8745 - DNA, 145 bp, synthetic construct
  source 1..145: mol_type = other DNA
cttatctcccacgacatcttacgctcttatctcccacgacatcttgccgctcttatctcccacgacatcttgctttcttatctcccacgacatcttgatctcttatctcccacgacatcttacgctcttatctcccacgacatct

SEQ ID NO: 8746 - DNA, 145 bp, synthetic construct
  source 1..145: mol_type = other DNA
agatgtcgtgggagataactacgctagatgtcgtgggagataactgccgctagatgtcgtgggagataactgctttagatgtcgtgggagataactgatctagatgtcgtgggagataactacgctagatgtcgtgggagataac

SEQ ID NO: 8747 - DNA, 145 bp, synthetic construct
  source 1..145: mol_type = other DNA
gttatctcccacgacatcttacgctgttatctcccacgacatcttgccgctgttatctcccacgacatcttgctttgttatctcccacgacatcttgatctgttatctcccacgacatcttacgctgttatctcccacgacatct

SEQ ID NO: 8748 - DNA, 145 bp, synthetic construct
  source 1..145: mol_type = other DNA
agatgtcgtggcagataagtacgctagatgtcgtggcagataagtgccgctagatgtcgtggcagataagtgctttagatgtcgtggcagataagtgatctagatgtcgtggcagataagtacgctagatgtcgtggcagataag

SEQ ID NO: 8749 - DNA, 145 bp, synthetic construct
  source 1..145: mol_type = other DNA
cttatctgccacgacatcttacgctcttatctgccacgacatcttgccgctcttatctgccacgacatcttgctttcttatctgccacgacatcttgatctcttatctgccacgacatcttacgctcttatctgccacgacatct

SEQ ID NO: 8750 - DNA, 145 bp, synthetic construct
  source 1..145: mol_type = other DNA
agatgtcgtggcagataactacgctagatgtcgtggcagataactgccgctagatgtcgtggcagataactgctttagatgtcgtggcagataactgatctagatgtcgtggcagataactacgctagatgtcgtggcagataac

SEQ ID NO: 8751 - DNA, 145 bp, synthetic construct
  source 1..145: mol_type = other DNA
gttatctgccacgacatcttacgctgttatctgccacgacatcttgccgctgttatctgccacgacatcttgctttgttatctgccacgacatcttgatctgttatctgccacgacatcttacgctgttatctgccacgacatct

SEQ ID NO: 8752 - DNA, 145 bp, synthetic construct
  source 1..145: mol_type = other DNA
agatgtcgtgtgagataagtacgctagatgtcgtgtgagataagtgccgctagatgtcgtgtgagataagtgctttagatgtcgtgtgagataagtgatctagatgtcgtgtgagataagtacgctagatgtcgtgtgagataag

SEQ ID NO: 8753 - DNA, 145 bp, synthetic construct
  source 1..145: mol_type = other DNA
cttatctcacacgacatcttacgctcttatctcacacgacatcttgccgctcttatctcacacgacatcttgctttcttatctcacacgacatcttgatctcttatctcacacgacatcttacgctcttatctcacacgacatct

SEQ ID NO: 8754 - DNA, 145 bp, synthetic construct
  source 1..145: mol_type = other DNA
agatgtcgtgtgagataactacgctagatgtcgtgtgagataactgccgctagatgtcgtgtgagataactgctttagatgtcgtgtgagataactgatctagatgtcgtgtgagataactacgctagatgtcgtgtgagataac

SEQ ID NO: 8755 - DNA, 145 bp, synthetic construct
  source 1..145: mol_type = other DNA
gttatctcacacgacatcttacgctgttatctcacacgacatcttgccgctgttatctcacacgacatcttgctttgttatctcacacgacatcttgatctgttatctcacacgacatcttacgctgttatctcacacgacatct

SEQ ID NO: 8756 - DNA, 145 bp, synthetic construct
  source 1..145: mol_type = other DNA
agatgtcgtgtcagataagtacgctagatgtcgtgtcagataagtgccgctagatgtcgtgtcagataagtgctttagatgtcgtgtcagataagtgatctagatgtcgtgtcagataagtacgctagatgtcgtgtcagataag

SEQ ID NO: 8757 - DNA, 145 bp, synthetic construct
  source 1..145: mol_type = other DNA
cttatctgacacgacatcttacgctcttatctgacacgacatcttgccgctcttatctgacacgacatcttgctttcttatctgacacgacatcttgatctcttatctgacacgacatcttacgctcttatctgacacgacatct

SEQ ID NO: 8758 - DNA, 145 bp, synthetic construct
  source 1..145: mol_type = other DNA
agatgtcgtgtcagataactacgctagatgtcgtgtcagataactgccgctagatgtcgtgtcagataactgctttagatgtcgtgtcagataactgatctagatgtcgtgtcagataactacgctagatgtcgtgtcagataac

SEQ ID NO: 8759 - DNA, 145 bp, synthetic construct
  source 1..145: mol_type = other DNA
gttatctgacacgacatcttacgctgttatctgacacgacatcttgccgctgttatctgacacgacatcttgctttgttatctgacacgacatcttgatctgttatctgacacgacatcttacgctgttatctgacacgacatct

SEQ ID NO: 8760 - DNA, 145 bp, synthetic construct
  source 1..145: mol_type = other DNA
agatgtcttgagagataagtacgctagatgtcttgagagataagtgccgctagatgtcttgagagataagtgctttagatgtcttgagagataagtgatctagatgtcttgagagataagtacgctagatgtcttgagagataag

SEQ ID NO: 8761 - DNA, 145 bp, synthetic construct
  source 1..145: mol_type = other DNA
cttatctctcaagacatcttacgctcttatctctcaagacatcttgccgctcttatctctcaagacatcttgctttcttatctctcaagacatcttgatctcttatctctcaagacatcttacgctcttatctctcaagacatct

SEQ ID NO: 8762 - DNA, 145 bp, synthetic construct
  source 1..145: mol_type = other DNA
agatgtcttgagagataactacgctagatgtcttgagagataactgccgctagatgtcttgagagataactgctttagatgtcttgagagataactgatctagatgtcttgagagataactacgctagatgtcttgagagataac

SEQ ID NO: 8763 - DNA, 145 bp, synthetic construct
  source 1..145: mol_type = other DNA
gttatctctcaagacatcttacgctgttatctctcaagacatcttgccgctgttatctctcaagacatcttgctttgttatctctcaagacatcttgatctgttatctctcaagacatcttacgctgttatctctcaagacatct

SEQ ID NO: 8764 - DNA, 145 bp, synthetic construct
  source 1..145: mol_type = other DNA
agatgtcttgacagataagtacgctagatgtcttgacagataagtgccgctagatgtcttgacagataagtgctttagatgtcttgacagataagtgatctagatgtcttgacagataagtacgctagatgtcttgacagataag

SEQ ID NO: 8765 - DNA, 145 bp, synthetic construct
  source 1..145: mol_type = other DNA
cttatctgtcaagacatcttacgctcttatctgtcaagacatcttgccgctcttatctgtcaagacatcttgctttcttatctgtcaagacatcttgatctcttatctgtcaagacatcttacgctcttatctgtcaagacatct

SEQ ID NO: 8766 - DNA, 145 bp, synthetic construct
  source 1..145: mol_type = other DNA
agatgtcttgacagataactacgctagatgtcttgacagataactgccgctagatgtcttgacagataactgctttagatgtcttgacagataactgatctagatgtcttgacagataactacgctagatgtcttgacagataac

SEQ ID NO: 8767 - DNA, 145 bp, synthetic construct
  source 1..145: mol_type = other DNA
gttatctgtcaagacatcttacgctgttatctgtcaagacatcttgccgctgttatctgtcaagacatcttgctttgttatctgtcaagacatcttgatctgttatctgtcaagacatcttacgctgttatctgtcaagacatct

SEQ ID NO: 8768 - DNA, 145 bp, synthetic construct
  source 1..145: mol_type = other DNA
agatgtcttgggagataagtacgctagatgtcttgggagataagtgccgctagatgtcttgggagataagtgctttagatgtcttgggagataagtgatctagatgtcttgggagataagtacgctagatgtcttgggagataag

SEQ ID NO: 8769 - DNA, 145 bp, synthetic construct
  source 1..145: mol_type = other DNA
cttatctcccaagacatcttacgctcttatctcccaagacatcttgccgctcttatctcccaagacatcttgctttcttatctcccaagacatcttgatctcttatctcccaagacatcttacgctcttatctcccaagacatct

SEQ ID NO: 8770 - DNA, 145 bp, synthetic construct
  source 1..145: mol_type = other DNA
agatgtcttgggagataactacgctagatgtcttgggagataactgccgctagatgtcttgggagataactgctttagatgtcttgggagataactgatctagatgtcttgggagataactacgctagatgtcttgggagataac

SEQ ID NO: 8771 - DNA, 145 bp, synthetic construct
  source 1..145: mol_type = other DNA
gttatctcccaagacatcttacgctgttatctcccaagacatcttgccgctgttatctcccaagacatcttgctttgttatctcccaagacatcttgatctgttatctcccaagacatcttacgctgttatctcccaagacatct

SEQ ID NO: 8772 - DNA, 145 bp, synthetic construct
  source 1..145: mol_type = other DNA
agatgtcttggcagataagtacgctagatgtcttggcagataagtgccgctagatgtcttggcagataagtgctttagatgtcttggcagataagtgatctagatgtcttggcagataagtacgctagatgtcttggcagataag

SEQ ID NO: 8773 - DNA, 145 bp, synthetic construct
  source 1..145: mol_type = other DNA
cttatctgccaagacatcttacgctcttatctgccaagacatcttgccgctcttatctgccaagacatcttgctttcttatctgccaagacatcttgatctcttatctgccaagacatcttacgctcttatctgccaagacatct

SEQ ID NO: 8774 - DNA, 145 bp, synthetic construct
  source 1..145: mol_type = other DNA
agatgtcttggcagataactacgctagatgtcttggcagataactgccgctagatgtcttggcagataactgctttagatgtcttggcagataactgatctagatgtcttggcagataactacgctagatgtcttggcagataac

SEQ ID NO: 8775 - DNA, 145 bp, synthetic construct
  source 1..145: mol_type = other DNA
gttatctgccaagacatcttacgctgttatctgccaagacatcttgccgctgttatctgccaagacatcttgctttgttatctgccaagacatcttgatctgttatctgccaagacatcttacgctgttatctgccaagacatct

SEQ ID NO: 8776 - DNA, 145 bp, synthetic construct
  source 1..145: mol_type = other DNA
agatgtcttgtgagataagtacgctagatgtcttgtgagataagtgccgctagatgtcttgtgagataagtgctttagatgtcttgtgagataagtgatctagatgtcttgtgagataagtacgctagatgtcttgtgagataag

SEQ ID NO: 8777 - DNA, 145 bp, synthetic construct
  source 1..145: mol_type = other DNA
cttatctcacaagacatcttacgctcttatctcacaagacatcttgccgctcttatctcacaagacatcttgctttcttatctcacaagacatcttgatctcttatctcacaagacatcttacgctcttatctcacaagacatct

SEQ ID NO: 8778 - DNA, 145 bp, synthetic construct
  source 1..145: mol_type = other DNA
agatgtcttgtgagataactacgctagatgtcttgtgagataactgccgctagatgtcttgtgagataactgctttagatgtcttgtgagataactgatctagatgtcttgtgagataactacgctagatgtcttgtgagataac

SEQ ID NO: 8779 - DNA, 145 bp, synthetic construct
  source 1..145: mol_type = other DNA
gttatctcacaagacatcttacgctgttatctcacaagacatcttgccgctgttatctcacaagacatcttgctttgttatctcacaagacatcttgatctgttatctcacaagacatcttacgctgttatctcacaagacatct

SEQ ID NO: 8780 - DNA, 145 bp, synthetic construct
  source 1..145: mol_type = other DNA
agatgtcttgtcagataagtacgctagatgtcttgtcagataagtgccgctagatgtcttgtcagataagtgctttagatgtcttgtcagataagtgatctagatgtcttgtcagataagtacgctagatgtcttgtcagataag

SEQ ID NO: 8781 - DNA, 145 bp, synthetic construct
  source 1..145: mol_type = other DNA
cttatctgacaagacatcttacgctcttatctgacaagacatcttgccgctcttatctgacaagacatcttgctttcttatctgacaagacatcttgatctcttatctgacaagacatcttacgctcttatctgacaagacatct

SEQ ID NO: 8782 - DNA, 145 bp, synthetic construct
  source 1..145: mol_type = other DNA
agatgtcttgtcagataactacgctagatgtcttgtcagataactgccgctagatgtcttgtcagataactgctttagatgtcttgtcagataactgatctagatgtcttgtcagataactacgctagatgtcttgtcagataac

SEQ ID NO: 8783 - DNA, 145 bp, synthetic construct
  source 1..145: mol_type = other DNA
gttatctgacaagacatcttacgctgttatctgacaagacatcttgccgctgttatctgacaagacatcttgctttgttatctgacaagacatcttgatctgttatctgacaagacatcttacgctgttatctgacaagacatct

SEQ ID NO: 8784 - DNA, 145 bp, synthetic construct
  source 1..145: mol_type = other DNA
agatctcatgagagataagtacgctagatctcatgagagataagtgccgctagatctcatgagagataagtgctttagatctcatgagagataagtgatctagatctcatgagagataagtacgctagatctcatgagagataag

SEQ ID NO: 8785 - DNA, 145 bp, synthetic construct
  source 1..145: mol_type = other DNA
cttatctctcatgagatcttacgctcttatctctcatgagatcttgccgctcttatctctcatgagatcttgctttcttatctctcatgagatcttgatctcttatctctcatgagatcttacgctcttatctctcatgagatct

SEQ ID NO: 8786 - DNA, 145 bp, synthetic construct
  source 1..145: mol_type = other DNA
agatctcatgagagataactacgctagatctcatgagagataactgccgctagatctcatgagagataactgctttagatctcatgagagataactgatctagatctcatgagagataactacgctagatctcatgagagataac

SEQ ID NO: 8787 - DNA, 145 bp, synthetic construct
  source 1..145: mol_type = other DNA
gttatctctcatgagatcttacgctgttatctctcatgagatcttgccgctgttatctctcatgagatcttgctttgttatctctcatgagatcttgatctgttatctctcatgagatcttacgctgttatctctcatgagatct

SEQ ID NO: 8788 - DNA, 145 bp, synthetic construct
  source 1..145: mol_type = other DNA
agatctcatgacagataagtacgctagatctcatgacagataagtgccgctagatctcatgacagataagtgctttagatctcatgacagataagtgatctagatctcatgacagataagtacgctagatctcatgacagataag

SEQ ID NO: 8789 - DNA, 145 bp, synthetic construct
  source 1..145: mol_type = other DNA
cttatctgtcatgagatcttacgctcttatctgtcatgagatcttgccgctcttatctgtcatgagatcttgctttcttatctgtcatgagatcttgatctcttatctgtcatgagatcttacgctcttatctgtcatgagatct

SEQ ID NO: 8790 - DNA, 145 bp, synthetic construct
  source 1..145: mol_type = other DNA
agatctcatgacagataactacgctagatctcatgacagataactgccgctagatctcatgacagataactgctttagatctcatgacagataactgatctagatctcatgacagataactacgctagatctcatgacagataac

SEQ ID NO: 8791 - DNA, 145 bp, synthetic construct
  source 1..145: mol_type = other DNA
gttatctgtcatgagatcttacgctgttatctgtcatgagatcttgccgctgttatctgtcatgagatcttgctttgttatctgtcatgagatcttgatctgttatctgtcatgagatcttacgctgttatctgtcatgagatct

SEQ ID NO: 8792 - DNA, 145 bp, synthetic construct
  source 1..145: mol_type = other DNA
agatctcatgggagataagtacgctagatctcatgggagataagtgccgctagatctcatgggagataagtgctttagatctcatgggagataagtgatctagatctcatgggagataagtacgctagatctcatgggagataag

SEQ ID NO: 8793 - DNA, 145 bp, synthetic construct
  source 1..145: mol_type = other DNA
cttatctcccatgagatcttacgctcttatctcccatgagatcttgccgctcttatctcccatgagatcttgctttcttatctcccatgagatcttgatctcttatctcccatgagatcttacgctcttatctcccatgagatct

SEQ ID NO: 8794 - DNA, 145 bp, synthetic construct
  source 1..145: mol_type = other DNA
agatctcatgggagataactacgctagatctcatgggagataactgccgctagatctcatgggagataactgctttagatctcatgggagataactgatctagatctcatgggagataactacgctagatctcatgggagataac

SEQ ID NO: 8795 - DNA, 145 bp, synthetic construct
  source 1..145: mol_type = other DNA
gttatctcccatgagatcttacgctgttatctcccatgagatcttgccgctgttatctcccatgagatcttgctttgttatctcccatgagatcttgatctgttatctcccatgagatcttacgctgttatctcccatgagatct

SEQ ID NO: 8796 - DNA, 145 bp, synthetic construct
  source 1..145: mol_type = other DNA
agatctcatggcagataagtacgctagatctcatggcagataagtgccgctagatctcatggcagataagtgctttagatctcatggcagataagtgatctagatctcatggcagataagtacgctagatctcatggcagataag

SEQ ID NO: 8797 - DNA, 145 bp, synthetic construct
  source 1..145: mol_type = other DNA
cttatctgccatgagatcttacgctcttatctgccatgagatcttgccgctcttatctgccatgagatcttgctttcttatctgccatgagatcttgatctcttatctgccatgagatcttacgctcttatctgccatgagatct

SEQ ID NO: 8798 - DNA, 145 bp, synthetic construct
  source 1..145: mol_type = other DNA
agatctcatggcagataactacgctagatctcatggcagataactgccgctagatctcatggcagataactgctttagatctcatggcagataactgatctagatctcatggcagataactacgctagatctcatggcagataac

SEQ ID NO: 8799 - DNA, 145 bp, synthetic construct
  source 1..145: mol_type = other DNA
gttatctgccatgagatcttacgctgttatctgccatgagatcttgccgctgttatctgccatgagatcttgctttgttatctgccatgagatcttgatctgttatctgccatgagatcttacgctgttatctgccatgagatct

SEQ ID NO: 8800 - DNA, 145 bp, synthetic construct
  source 1..145: mol_type = other DNA
agatctcatgtgagataagtacgctagatctcatgtgagataagtgccgctagatctcatgtgagataagtgctttagatctcatgtgagataagtgatctagatctcatgtgagataagtacgctagatctcatgtgagataag

SEQ ID NO: 8801 - DNA, 145 bp, synthetic construct
  source 1..145: mol_type = other DNA
cttatctcacatgagatcttacgctcttatctcacatgagatcttgccgctcttatctcacatgagatcttgctttcttatctcacatgagatcttgatctcttatctcacatgagatcttacgctcttatctcacatgagatct

SEQ ID NO: 8802 - DNA, 145 bp, synthetic construct
  source 1..145: mol_type = other DNA
agatctcatgtgagataactacgctagatctcatgtgagataactgccgctagatctcatgtgagataactgctttagatctcatgtgagataactgatctagatctcatgtgagataactacgctagatctcatgtgagataac

SEQ ID NO: 8803 - DNA, 145 bp, synthetic construct
  source 1..145: mol_type = other DNA
gttatctcacatgagatcttacgctgttatctcacatgagatcttgccgctgttatctcacatgagatcttgctttgttatctcacatgagatcttgatctgttatctcacatgagatcttacgctgttatctcacatgagatct

SEQ ID NO: 8804 - DNA, 145 bp, synthetic construct
  source 1..145: mol_type = other DNA
agatctcatgtcagataagtacgctagatctcatgtcagataagtgccgctagatctcatgtcagataagtgctttagatctcatgtcagataagtgatctagatctcatgtcagataagtacgctagatctcatgtcagataag

SEQ ID NO: 8805 - DNA, 145 bp, synthetic construct
  source 1..145: mol_type = other DNA
cttatctgacatgagatcttacgctcttatctgacatgagatcttgccgctcttatctgacatgagatcttgctttcttatctgacatgagatcttgatctcttatctgacatgagatcttacgctcttatctgacatgagatct

SEQ ID NO: 8806 - DNA, 145 bp, synthetic construct
  source 1..145: mol_type = other DNA
agatctcatgtcagataactacgctagatctcatgtcagataactgccgctagatctcatgtcagataactgctttagatctcatgtcagataactgatctagatctcatgtcagataactacgctagatctcatgtcagataac

SEQ ID NO: 8807 - DNA, 145 bp, synthetic construct
  source 1..145: mol_type = other DNA
gttatctgacatgagatcttacgctgttatctgacatgagatcttgccgctgttatctgacatgagatcttgctttgttatctgacatgagatcttgatctgttatctgacatgagatcttacgctgttatctgacatgagatct

SEQ ID NO: 8808 - DNA, 145 bp, synthetic construct
  source 1..145: mol_type = other DNA
agatctcgtgagagataagtacgctagatctcgtgagagataagtgccgctagatctcgtgagagataagtgctttagatctcgtgagagataagtgatctagatctcgtgagagataagtacgctagatctcgtgagagataag

SEQ ID NO: 8809 - DNA, 145 bp, synthetic construct
  source 1..145: mol_type = other DNA
cttatctctcacgagatcttacgctcttatctctcacgagatcttgccgctcttatctctcacgagatcttgctttcttatctctcacgagatcttgatctcttatctctcacgagatcttacgctcttatctctcacgagatct

SEQ ID NO: 8810 - DNA, 145 bp, synthetic construct
  source 1..145: mol_type = other DNA
agatctcgtgagagataactacgctagatctcgtgagagataactgccgctagatctcgtgagagataactgctttagatctcgtgagagataactgatctagatctcgtgagagataactacgctagatctcgtgagagataac

SEQ ID NO: 8811 - DNA, 145 bp, synthetic construct
  source 1..145: mol_type = other DNA
gttatctctcacgagatcttacgctgttatctctcacgagatcttgccgctgttatctctcacgagatcttgctttgttatctctcacgagatcttgatctgttatctctcacgagatcttacgctgttatctctcacgagatct

SEQ ID NO: 8812 - DNA, 145 bp, synthetic construct
  source 1..145: mol_type = other DNA
agatctcgtgacagataagtacgctagatctcgtgacagataagtgccgctagatctcgtgacagataagtgctttagatctcgtgacagataagtgatctagatctcgtgacagataagtacgctagatctcgtgacagataag

SEQ ID NO: 8813 - DNA, 145 bp, synthetic construct
  source 1..145: mol_type = other DNA
cttatctgtcacgagatcttacgctcttatctgtcacgagatcttgccgctcttatctgtcacgagatcttgctttcttatctgtcacgagatcttgatctcttatctgtcacgagatcttacgctcttatctgtcacgagatct

SEQ ID NO: 8814 - DNA, 145 bp, synthetic construct
  source 1..145: mol_type = other DNA
agatctcgtgacagataactacgctagatctcgtgacagataactgccgctagatctcgtgacagataactgctttagatctcgtgacagataactgatctagatctcgtgacagataactacgctagatctcgtgacagataac

SEQ ID NO: 8815 - DNA, 145 bp, synthetic construct
  source 1..145: mol_type = other DNA
gttatctgtcacgagatcttacgctgttatctgtcacgagatcttgccgctgttatctgtcacgagatcttgctttgttatctgtcacgagatcttgatctgttatctgtcacgagatcttacgctgttatctgtcacgagatct

SEQ ID NO: 8816 - DNA, 145 bp, synthetic construct
  source 1..145: mol_type = other DNA
agatctcgtgggagataagtacgctagatctcgtgggagataagtgccgctagatctcgtgggagataagtgctttagatctcgtgggagataagtgatctagatctcgtgggagataagtacgctagatctcgtgggagataag

SEQ ID NO: 8817 - DNA, 145 bp, synthetic construct
  source 1..145: mol_type = other DNA
cttatctcccacgagatcttacgctcttatctcccacgagatcttgccgctcttatctcccacgagatcttgctttcttatctcccacgagatcttgatctcttatctcccacgagatcttacgctcttatctcccacgagatct

SEQ ID NO: 8818 - DNA, 145 bp, synthetic construct
  source 1..145: mol_type = other DNA
agatctcgtgggagataactacgctagatctcgtgggagataactgccgctagatctcgtgggagataactgctttagatctcgtgggagataactgatctagatctcgtgggagataactacgctagatctcgtgggagataac

SEQ ID NO: 8819 - DNA, 145 bp, synthetic construct
  source 1..145: mol_type = other DNA
gttatctcccacgagatcttacgctgttatctcccacgagatcttgccgctgttatctcccacgagatcttgctttgttatctcccacgagatcttgatctgttatctcccacgagatcttacgctgttatctcccacgagatct

SEQ ID NO: 8820 - DNA, 145 bp, synthetic construct
  source 1..145: mol_type = other DNA
agatctcgtggcagataagtacgctagatctcgtggcagataagtgccgctagatctcgtggcagataagtgctttagatctcgtggcagataagtgatctagatctcgtggcagataagtacgctagatctcgtggcagataag

SEQ ID NO: 8821 - DNA, 145 bp, synthetic construct
  source 1..145: mol_type = other DNA
cttatctgccacgagatcttacgctcttatctgccacgagatcttgccgctcttatctgccacgagatcttgctttcttatctgccacgagatcttgatctcttatctgccacgagatcttacgctcttatctgccacgagatct

SEQ ID NO: 8822 - DNA, 145 bp, synthetic construct
  source 1..145: mol_type = other DNA
agatctcgtggcagataactacgctagatctcgtggcagataactgccgctagatctcgtggcagataactgctttagatctcgtggcagataactgatctagatctcgtggcagataactacgctagatctcgtggcagataac

SEQ ID NO: 8823 - DNA, 145 bp, synthetic construct
  source 1..145: mol_type = other DNA
gttatctgccacgagatcttacgctgttatctgccacgagatcttgccgctgttatctgccacgagatcttgctttgttatctgccacgagatcttgatctgttatctgccacgagatcttacgctgttatctgccacgagatct

SEQ ID NO: 8824 - DNA, 145 bp, synthetic construct
  source 1..145: mol_type = other DNA
agatctcgtgtgagataagtacgctagatctcgtgtgagataagtgccgctagatctcgtgtgagataagtgctttagatctcgtgtgagataagtgatctagatctcgtgtgagataagtacgctagatctcgtgtgagataag

SEQ ID NO: 8825 - DNA, 145 bp, synthetic construct
  source 1..145: mol_type = other DNA
cttatctcacacgagatcttacgctcttatctcacacgagatcttgccgctcttatctcacacgagatcttgctttcttatctcacacgagatcttgatctcttatctcacacgagatcttacgctcttatctcacacgagatct

SEQ ID NO: 8826 - DNA, 145 bp, synthetic construct
  source 1..145: mol_type = other DNA
agatctcgtgtgagataactacgctagatctcgtgtgagataactgccgctagatctcgtgtgagataactgctttagatctcgtgtgagataactgatctagatctcgtgtgagataactacgctagatctcgtgtgagataac

SEQ ID NO: 8827 - DNA, 145 bp, synthetic construct
  source 1..145: mol_type = other DNA
gttatctcacacgagatcttacgctgttatctcacacgagatcttgccgctgttatctcacacgagatcttgctttgttatctcacacgagatcttgatctgttatctcacacgagatcttacgctgttatctcacacgagatct

SEQ ID NO: 8828 - DNA, 145 bp, synthetic construct
  source 1..145: mol_type = other DNA
agatctcgtgtcagataagtacgctagatctcgtgtcagataagtgccgctagatctcgtgtcagataagtgctttagatctcgtgtcagataagtgatctagatctcgtgtcagataagtacgctagatctcgtgtcagataag

SEQ ID NO: 8829 - DNA, 145 bp, synthetic construct
  source 1..145: mol_type = other DNA
cttatctgacacgagatcttacgctcttatctgacacgagatcttgccgctcttatctgacacgagatcttgctttcttatctgacacgagatcttgatctcttatctgacacgagatcttacgctcttatctgacacgagatct

SEQ ID NO: 8830 - DNA, 145 bp, synthetic construct
  source 1..145: mol_type = other DNA
agatctcgtgtcagataactacgctagatctcgtgtcagataactgccgctagatctcgtgtcagataactgctttagatctcgtgtcagataactgatctagatctcgtgtcagataactacgctagatctcgtgtcagataac

SEQ ID NO: 8831 - DNA, 145 bp, synthetic construct
  source 1..145: mol_type = other DNA
gttatctgacacgagatcttacgctgttatctgacacgagatcttgccgctgttatctgacacgagatcttgctttgttatctgacacgagatcttgatctgttatctgacacgagatcttacgctgttatctgacacgagatct

SEQ ID NO: 8832 - DNA, 145 bp, synthetic construct
  source 1..145: mol_type = other DNA
agatctcttgagagataagtacgctagatctcttgagagataagtgccgctagatctcttgagagataagtgctttagatctcttgagagataagtgatctagatctcttgagagataagtacgctagatctcttgagagataag

SEQ ID NO: 8833 - DNA, 145 bp, synthetic construct
  source 1..145: mol_type = other DNA
cttatctctcaagagatcttacgctcttatctctcaagagatcttgccgctcttatctctcaagagatcttgctttcttatctctcaagagatcttgatctcttatctctcaagagatcttacgctcttatctctcaagagatct

SEQ ID NO: 8834 - DNA, 145 bp, synthetic construct
  source 1..145: mol_type = other DNA
agatctcttgagagataactacgctagatctcttgagagataactgccgctagatctcttgagagataactgctttagatctcttgagagataactgatctagatctcttgagagataactacgctagatctcttgagagataac

SEQ ID NO: 8835 - DNA, 145 bp, synthetic construct
  source 1..145: mol_type = other DNA
gttatctctcaagagatcttacgctgttatctctcaagagatcttgccgctgttatctctcaagagatcttgctttgttatctctcaagagatcttgatctgttatctctcaagagatcttacgctgttatctctcaagagatct

SEQ ID NO: 8836 - DNA, 145 bp, synthetic construct
  source 1..145: mol_type = other DNA
agatctcttgacagataagtacgctagatctcttgacagataagtgccgctagatctcttgacagataagtgctttagatctcttgacagataagtgatctagatctcttgacagataagtacgctagatctcttgacagataag

SEQ ID NO: 8837 - DNA, 145 bp, synthetic construct
  source 1..145: mol_type = other DNA
cttatctgtcaagagatcttacgctcttatctgtcaagagatcttgccgctcttatctgtcaagagatcttgctttcttatctgtcaagagatcttgatctcttatctgtcaagagatcttacgctcttatctgtcaagagatct

SEQ ID NO: 8838 - DNA, 145 bp, synthetic construct
  source 1..145: mol_type = other DNA
agatctcttgacagataactacgctagatctcttgacagataactgccgctagatctcttgacagataactgctttagatctcttgacagataactgatctagatctcttgacagataactacgctagatctcttgacagataac

SEQ ID NO: 8839 - DNA, 145 bp, synthetic construct
  source 1..145: mol_type = other DNA
gttatctgtcaagagatcttacgctgttatctgtcaagagatcttgccgctgttatctgtcaagagatcttgctttgttatctgtcaagagatcttgatctgttatctgtcaagagatcttacgctgttatctgtcaagagatct

SEQ ID NO: 8840 - DNA, 145 bp, synthetic construct
  source 1..145: mol_type = other DNA
agatctcttgggagataagtacgctagatctcttgggagataagtgccgctagatctcttgggagataagtgctttagatctcttgggagataagtgatctagatctcttgggagataagtacgctagatctcttgggagataag

SEQ ID NO: 8841 - DNA, 145 bp, synthetic construct
  source 1..145: mol_type = other DNA
cttatctcccaagagatcttacgctcttatctcccaagagatcttgccgctcttatctcccaagagatcttgctttcttatctcccaagagatcttgatctcttatctcccaagagatcttacgctcttatctcccaagagatct

SEQ ID NO: 8842 - DNA, 145 bp, synthetic construct
  source 1..145: mol_type = other DNA
agatctcttgggagataactacgctagatctcttgggagataactgccgctagatctcttgggagataactgctttagatctcttgggagataactgatctagatctcttgggagataactacgctagatctcttgggagataac

SEQ ID NO: 8843 - DNA, 145 bp, synthetic construct
  source 1..145: mol_type = other DNA
gttatctcccaagagatcttacgctgttatctcccaagagatcttgccgctgttatctcccaagagatcttgctttgttatctcccaagagatcttgatctgttatctcccaagagatcttacgctgttatctcccaagagatct

SEQ ID NO: 8844 - DNA, 145 bp, synthetic construct
  source 1..145: mol_type = other DNA
agatctcttggcagataagtacgctagatctcttggcagataagtgccgctagatctcttggcagataagtgctttagatctcttggcagataagtgatctagatctcttggcagataagtacgctagatctcttggcagataag

SEQ ID NO: 8845 - DNA, 145 bp, synthetic construct
  source 1..145: mol_type = other DNA
cttatctgccaagagatcttacgctcttatctgccaagagatcttgccgctcttatctgccaagagatcttgctttcttatctgccaagagatcttgatctcttatctgccaagagatcttacgctcttatctgccaagagatct

SEQ ID NO: 8846 - DNA, 145 bp, synthetic construct
  source 1..145: mol_type = other DNA
agatctcttggcagataactacgctagatctcttggcagataactgccgctagatctcttggcagataactgctttagatctcttggcagataactgatctagatctcttggcagataactacgctagatctcttggcagataac

SEQ ID NO: 8847 - DNA, 145 bp, synthetic construct
  source 1..145: mol_type = other DNA
gttatctgccaagagatcttacgctgttatctgccaagagatcttgccgctgttatctgccaagagatcttgctttgttatctgccaagagatcttgatctgttatctgccaagagatcttacgctgttatctgccaagagatct

SEQ ID NO: 8848 - DNA, 145 bp, synthetic construct
  source 1..145: mol_type = other DNA
agatctcttgtgagataagtacgctagatctcttgtgagataagtgccgctagatctcttgtgagataagtgctttagatctcttgtgagataagtgatctagatctcttgtgagataagtacgctagatctcttgtgagataag

SEQ ID NO: 8849 - DNA, 145 bp, synthetic construct
  source 1..145: mol_type = other DNA
cttatctcacaagagatcttacgctcttatctcacaagagatcttgccgctcttatctcacaagagatcttgctttcttatctcacaagagatcttgatctcttatctcacaagagatcttacgctcttatctcacaagagatct

SEQ ID NO: 8850 - DNA, 145 bp, synthetic construct
  source 1..145: mol_type = other DNA
agatctcttgtgagataactacgctagatctcttgtgagataactgccgctagatctcttgtgagataactgctttagatctcttgtgagataactgatctagatctcttgtgagataactacgctagatctcttgtgagataac

SEQ ID NO: 8851 - DNA, 145 bp, synthetic construct
  source 1..145: mol_type = other DNA
gttatctcacaagagatcttacgctgttatctcacaagagatcttgccgctgttatctcacaagagatcttgctttgttatctcacaagagatcttgatctgttatctcacaagagatcttacgctgttatctcacaagagatct

SEQ ID NO: 8852 - DNA, 145 bp, synthetic construct
  source 1..145: mol_type = other DNA
agatctcttgtcagataagtacgctagatctcttgtcagataagtgccgctagatctcttgtcagataagtgctttagatctcttgtcagataagtgatctagatctcttgtcagataagtacgctagatctcttgtcagataag

SEQ ID NO: 8853 - DNA, 145 bp, synthetic construct
  source 1..145: mol_type = other DNA
cttatctgacaagagatcttacgctcttatctgacaagagatcttgccgctcttatctgacaagagatcttgctttcttatctgacaagagatcttgatctcttatctgacaagagatcttacgctcttatctgacaagagatct

SEQ ID NO: 8854 - DNA, 145 bp, synthetic construct
  source 1..145: mol_type = other DNA
agatctcttgtcagataactacgctagatctcttgtcagataactgccgctagatctcttgtcagataactgctttagatctcttgtcagataactgatctagatctcttgtcagataactacgctagatctcttgtcagataac

SEQ ID NO: 8855 - DNA, 145 bp, synthetic construct
  source 1..145: mol_type = other DNA
gttatctgacaagagatcttacgctgttatctgacaagagatcttgccgctgttatctgacaagagatcttgctttgttatctgacaagagatcttgatctgttatctgacaagagatcttacgctgttatctgacaagagatct

SEQ ID NO: 8856 - DNA, 135 bp, synthetic construct
  source 1..135: mol_type = other DNA
tgacctttgccccatgatcttgacctttgccccatacgcttgacctttgccccatgccgcttgacctttgccccatgcttttgacctttgccccatgatcttgacctttgccccatacgcttgacctttgcccca

SEQ ID NO: 8857 - DNA, 135 bp, synthetic construct
  source 1..135: mol_type = other DNA
tggggcaaaggtcatgatcttggggcaaaggtcatacgcttggggcaaaggtcatgccgcttggggcaaaggtcatgcttttggggcaaaggtcatgatcttggggcaaaggtcatacgcttggggcaaaggtca

SEQ ID NO: 8858 - DNA, 139 bp, synthetic construct
  source 1..139: mol_type = other DNA
gctatttttagctgctttgctatttttagctgatctgctatttttagctacgctgctatttttagctgccgctgctatttttagctgctttgctatttttagctgatctgctatttttagctacgctgctatttttagc

SEQ ID NO: 8859 - DNA, 139 bp, synthetic construct
  source 1..139: mol_type = other DNA
gctaaaaatagctgctttgctaaaaatagctgatctgctaaaaatagctacgctgctaaaaatagctgccgctgctaaaaatagctgctttgctaaaaatagctgatctgctaaaaatagctacgctgctaaaaatagc

SEQ ID NO: 8860 - DNA, 140 bp, synthetic construct; identical to SEQ ID NO: 8426
  source 1..140: mol_type = other DNA

SEQ ID NO: 8861 - DNA, 140 bp, synthetic construct; identical to SEQ ID NO: 8427
  source 1..140: mol_type = other DNA

SEQ ID NO: 8862 - DNA, 146 bp, synthetic construct
  source 1..146: mol_type = other DNA
gccccgccctacgctgccccgccctgccgctgccccgccctgctttgccccgccctgatctgccccgccctacgctgccccgccctgccgctgccccgccctgctttgccccgccctgatctgccccgccctacgctgccccgccc

SEQ ID NO: 8863 - DNA, 146 bp, synthetic construct
  source 1..146: mol_type = other DNA
gggcggggctacgctgggcggggctgccgctgggcggggctgctttgggcggggctgatctgggcggggctacgctgggcggggctgccgctgggcggggctgctttgggcggggctgatctgggcggggctacgctgggcggggc

SEQ ID NO: 8864 - DNA, 146 bp, synthetic construct
  source 1..146: mol_type = other DNA
gcccctccctacgctgcccctccctgccgctgcccctccctgctttgcccctccctgatctgcccctccctacgctgcccctccctgccgctgcccctccctgctttgcccctccctgatctgcccctccctacgctgcccctccc

SEQ ID NO: 8865 - DNA, 146 bp, synthetic construct
  source 1..146: mol_type = other DNA
gggaggggctacgctgggaggggctgccgctgggaggggctgctttgggaggggctgatctgggaggggctacgctgggaggggctgccgctgggaggggctgctttgggaggggctgatctgggaggggctacgctgggaggggc

SEQ ID NO: 8866 - DNA, 146 bp, synthetic construct
  source 1..146: mol_type = other DNA
cccccgccctacgctcccccgccctgccgctcccccgccctgctttcccccgccctgatctcccccgccctacgctcccccgccctgccgctcccccgccctgctttcccccgccctgatctcccccgccctacgctcccccgccc

SEQ ID NO: 8867 - DNA, 146 bp, synthetic construct
  source 1..146: mol_type = other DNA
gggcgggggtacgctgggcgggggtgccgctgggcgggggtgctttgggcgggggtgatctgggcgggggtacgctgggcgggggtgccgctgggcgggggtgctttgggcgggggtgatctgggcgggggtacgctgggcggggg

SEQ ID NO: 8868 - DNA, 146 bp, synthetic construct
  source 1..146: mol_type = other DNA
ccccctccctacgctccccctccctgccgctccccctccctgctttccccctccctgatctccccctccctacgctccccctccctgccgctccccctccctgctttccccctccctgatctccccctccctacgctccccctccc

SEQ ID NO: 8869 - DNA, 146 bp, synthetic construct
  source 1..146: mol_type = other DNA
gggagggggtacgctgggagggggtgccgctgggagggggtgctttgggagggggtgatctgggagggggtacgctgggagggggtgccgctgggagggggtgctttgggagggggtgatctgggagggggtacgctgggaggggg

SEQ ID NO: 8870 - DNA, 136 bp, synthetic construct
  source 1..136: mol_type = other DNA
atgcgggttacgctatgcgggttgccgctatgcgggttgctttatgcgggttgatctatgcgggttacgctatgcgggttgccgctatgcgggttgctttatgcgggttgatctatgcgggttacgctatgcgggt

SEQ ID NO: 8871 - DNA, 136 bp, synthetic construct
  source 1..136: mol_type = other DNA
acccgcattacgctacccgcattgccgctacccgcattgctttacccgcattgatctacccgcattacgctacccgcattgccgctacccgcattgctttacccgcattgatctacccgcattacgctacccgcat

SEQ ID NO: 8872 - DNA, 146 bp, synthetic construct; identical to SEQ ID NO: 6912
  source 1..146: mol_type = other DNA

SEQ ID NO: 8873 - DNA, 146 bp, synthetic construct; identical to SEQ ID NO: 6913
  source 1..146: mol_type = other DNA

SEQ ID NO: 8874 - DNA, 146 bp, synthetic construct; identical to SEQ ID NO: 6611
  source 1..146: mol_type = other DNA

SEQ ID NO: 8875 - DNA, 146 bp, synthetic construct; identical to SEQ ID NO: 6610
  source 1..146: mol_type = other DNA

SEQ ID NO: 8876 - DNA, 146 bp, synthetic construct
  source 1..146: mol_type = other DNA
ccttatctttacgctccttatctttgccgctccttatctttgctttccttatctttgatctccttatctttacgctccttatctttgccgctccttatctttgctttccttatctttgatctccttatctttacgctccttatctt

SEQ ID NO: 8877 - DNA, 146 bp, synthetic construct
  source 1..146: mol_type = other DNA
aagataaggtacgctaagataaggtgccgctaagataaggtgctttaagataaggtgatctaagataaggtacgctaagataaggtgccgctaagataaggtgctttaagataaggtgatctaagataaggtacgctaagataagg

SEQ ID NO: 8878 - DNA, 146 bp, synthetic construct; identical to SEQ ID NO: 8469
  source 1..146: mol_type = other DNA

SEQ ID NO: 8879 - DNA, 146 bp, synthetic construct; identical to SEQ ID NO: 8468
  source 1..146: mol_type = other DNA

SEQ ID NO: 8880 - DNA, 146 bp, synthetic construct; identical to SEQ ID NO: 8461
  source 1..146: mol_type = other DNA

SEQ ID NO: 8881 - DNA, 146 bp, synthetic construct; identical to SEQ ID NO: 8460
  source 1..146: mol_type = other DNA

SEQ ID NO: 8882 - DNA, 146 bp, synthetic construct
  source 1..146: mol_type = other DNA
tcttatctttacgcttcttatctttgccgcttcttatctttgcttttcttatctttgatcttcttatctttacgcttcttatctttgccgcttcttatctttgcttttcttatctttgatcttcttatctttacgcttcttatctt

SEQ ID NO: 8883 - DNA, 146 bp, synthetic construct
  source 1..146: mol_type = other DNA
aagataagatacgctaagataagatgccgctaagataagatgctttaagataagatgatctaagataagatacgctaagataagatgccgctaagataagatgctttaagataagatgatctaagataagatacgctaagataaga

SEQ ID NO: 8884 - DNA, 142 bp, synthetic construct
  source 1..142: mol_type = other DNA
aaccacgcacccatctgatctaaccacgcacccatctacgctaaccacgcacccatctgccgctaaccacgcacccatctgctttaaccacgcacccatctgatctaaccacgcacccatctacgctaaccacgcacccatc

SEQ ID NO: 8885 - DNA, 142 bp, synthetic construct
  source 1..142: mol_type = other DNA
gatgggtgcgtggtttgatctgatgggtgcgtggtttacgctgatgggtgcgtggtttgccgctgatgggtgcgtggtttgctttgatgggtgcgtggtttgatctgatgggtgcgtggtttacgctgatgggtgcgtggtt

SEQ ID NO: 8886 - DNA, 142 bp, synthetic construct
  source 1..142: mol_type = other DNA
aaccacgcacccatttgatctaaccacgcacccatttacgctaaccacgcacccatttgccgctaaccacgcacccatttgctttaaccacgcacccatttgatctaaccacgcacccatttacgctaaccacgcacccatt

SEQ ID NO: 8887 - DNA, 142 bp, synthetic construct
  source 1..142: mol_type = other DNA
aatgggtgcgtggtttgatctaatgggtgcgtggtttacgctaatgggtgcgtggtttgccgctaatgggtgcgtggtttgctttaatgggtgcgtggtttgatctaatgggtgcgtggtttacgctaatgggtgcgtggtt

SEQ ID NO: 8888 - DNA, 142 bp, synthetic construct
  source 1..142: mol_type = other DNA
aaccacgcacccctctgatctaaccacgcacccctctacgctaaccacgcacccctctgccgctaaccacgcacccctctgctttaaccacgcacccctctgatctaaccacgcacccctctacgctaaccacgcacccctc

SEQ ID NO: 8889 - DNA, 142 bp, synthetic construct
  source 1..142: mol_type = other DNA
gaggggtgcgtggtttgatctgaggggtgcgtggtttacgctgaggggtgcgtggtttgccgctgaggggtgcgtggtttgctttgaggggtgcgtggtttgatctgaggggtgcgtggtttacgctgaggggtgcgtggtt

SEQ ID NO: 8890 - DNA, 142 bp, synthetic construct
  source 1..142: mol_type = other DNA
aaccacgcacccctttgatctaaccacgcacccctttacgctaaccacgcacccctttgccgctaaccacgcacccctttgctttaaccacgcacccctttgatctaaccacgcacccctttacgctaaccacgcacccctt

SEQ ID NO: 8891 - DNA, 142 bp, synthetic construct
  source 1..142: mol_type = other DNA
aaggggtgcgtggtttgatctaaggggtgcgtggtttacgctaaggggtgcgtggtttgccgctaaggggtgcgtggtttgctttaaggggtgcgtggtttgatctaaggggtgcgtggtttacgctaaggggtgcgtggtt

SEQ ID NO: 8892 - DNA, 142 bp, synthetic construct
  source 1..142: mol_type = other DNA
acccacgcacccatctgatctacccacgcacccatctacgctacccacgcacccatctgccgctacccacgcacccatctgctttacccacgcacccatctgatctacccacgcacccatctacgctacccacgcacccatc

SEQ ID NO: 8893 - DNA, 142 bp, synthetic construct
  source 1..142: mol_type = other DNA
gatgggtgcgtgggttgatctgatgggtgcgtgggttacgctgatgggtgcgtgggttgccgctgatgggtgcgtgggttgctttgatgggtgcgtgggttgatctgatgggtgcgtgggttacgctgatgggtgcgtgggt

SEQ ID NO: 8894 - DNA, 142 bp, synthetic construct
  source 1..142: mol_type = other DNA
acccacgcacccatttgatctacccacgcacccatttacgctacccacgcacccatttgccgctacccacgcacccatttgctttacccacgcacccatttgatctacccacgcacccatttacgctacccacgcacccatt

SEQ ID NO: 8895 - DNA, 142 bp, synthetic construct
  source 1..142: mol_type = other DNA
aatgggtgcgtgggttgatctaatgggtgcgtgggttacgctaatgggtgcgtgggttgccgctaatgggtgcgtgggttgctttaatgggtgcgtgggttgatctaatgggtgcgtgggttacgctaatgggtgcgtgggt

SEQ ID NO: 8896 - DNA, 142 bp, synthetic construct
  source 1..142: mol_type = other DNA
acccacgcacccctctgatctacccacgcacccctctacgctacccacgcacccctctgccgctacccacgcacccctctgctttacccacgcacccctctgatctacccacgcacccctctacgctacccacgcacccctc

SEQ ID NO: 8897 - DNA, 142 bp, synthetic construct
  source 1..142: mol_type = other DNA
gaggggtgcgtgggttgatctgaggggtgcgtgggttacgctgaggggtgcgtgggttgccgctgaggggtgcgtgggttgctttgaggggtgcgtgggttgatctgaggggtgcgtgggttacgctgaggggtgcgtgggt

SEQ ID NO: 8898 - DNA, 142 bp, synthetic construct
  source 1..142: mol_type = other DNA
acccacgcacccctttgatctacccacgcacccctttacgctacccacgcacccctttgccgctacccacgcacccctttgctttacccacgcacccctttgatctacccacgcacccctttacgctacccacgcacccctt

SEQ ID NO: 8899 - DNA, 142 bp, synthetic construct
  source 1..142: mol_type = other DNA
aaggggtgcgtgggttgatctaaggggtgcgtgggttacgctaaggggtgcgtgggttgccgctaaggggtgcgtgggttgctttaaggggtgcgtgggttgatctaaggggtgcgtgggttacgctaaggggtgcgtgggt

SEQ ID NO: 8900 - DNA, 142 bp, synthetic construct
  source 1..142: mol_type = other DNA
caccacgcacccatctgatctcaccacgcacccatctacgctcaccacgcacccatctgccgctcaccacgcacccatctgctttcaccacgcacccatctgatctcaccacgcacccatctacgctcaccacgcacccatc

SEQ ID NO: 8901 - DNA, 142 bp, synthetic construct
  source 1..142: mol_type = other DNA
gatgggtgcgtggtgtgatctgatgggtgcgtggtgtacgctgatgggtgcgtggtgtgccgctgatgggtgcgtggtgtgctttgatgggtgcgtggtgtgatctgatgggtgcgtggtgtacgctgatgggtgcgtggtg

SEQ ID NO: 8902 - DNA, 142 bp, synthetic construct
  source 1..142: mol_type = other DNA
caccacgcacccatttgatctcaccacgcacccatttacgctcaccacgcacccatttgccgctcaccacgcacccatttgctttcaccacgcacccatttgatctcaccacgcacccatttacgctcaccacgcacccatt

SEQ ID NO: 8903 - DNA, 142 bp, synthetic construct
  source 1..142: mol_type = other DNA
aatgggtgcgtggtgtgatctaatgggtgcgtggtgtacgctaatgggtgcgtggtgtgccgctaatgggtgcgtggtgtgctttaatgggtgcgtggtgtgatctaatgggtgcgtggtgtacgctaatgggtgcgtggtg

SEQ ID NO: 8904 - DNA, 142 bp, synthetic construct
  source 1..142: mol_type = other DNA
caccacgcacccctctgatctcaccacgcacccctctacgctcaccacgcacccctctgccgctcaccacgcacccctctgctttcaccacgcacccctctgatctcaccacgcacccctctacgctcaccacgcacccctc

SEQ ID NO: 8905 - DNA, 142 bp, synthetic construct
  source 1..142: mol_type = other DNA
gaggggtgcgtggtgtgatctgaggggtgcgtggtgtacgctgaggggtgcgtggtgtgccgctgaggggtgcgtggtgtgctttgaggggtgcgtggtgtgatctgaggggtgcgtggtgtacgctgaggggtgcgtggtg

SEQ ID NO: 8906 - DNA, 142 bp, synthetic construct
  source 1..142: mol_type = other DNA
caccacgcacccctttgatctcaccacgcacccctttacgctcaccacgcacccctttgccgctcaccacgcacccctttgctttcaccacgcacccctttgatctcaccacgcacccctttacgctcaccacgcacccctt

SEQ ID NO: 8907 - DNA, 142 bp, synthetic construct
  source 1..142: mol_type = other DNA
aaggggtgcgtggtgtgatctaaggggtgcgtggtgtacgctaaggggtgcgtggtgtgccgctaaggggtgcgtggtgtgctttaaggggtgcgtggtgtgatctaaggggtgcgtggtgtacgctaaggggtgcgtggtg

SEQ ID NO: 8908 - DNA, 142 bp, synthetic construct
  source 1..142: mol_type = other DNA
ccccacgcacccatctgatctccccacgcacccatctacgctccccacgcacccatctgccgctccccacgcacccatctgctttccccacgcacccatctgatctccccacgcacccatctacgctccccacgcacccatc

SEQ ID NO: 8909 - DNA, 142 bp, synthetic construct
  source 1..142: mol_type = other DNA
gatgggtgcgtggggtgatctgatgggtgcgtggggtacgctgatgggtgcgtggggtgccgctgatgggtgcgtggggtgctttgatgggtgcgtggggtgatctgatgggtgcgtggggtacgctgatgggtgcgtgggg

SEQ ID NO: 8910 - DNA, 142 bp, synthetic construct
  source 1..142: mol_type = other DNA
ccccacgcacccatttgatctccccacgcacccatttacgctccccacgcacccatttgccgctccccacgcacccatttgctttccccacgcacccatttgatctccccacgcacccatttacgctccccacgcacccatt

SEQ ID NO: 8911 - DNA, 142 bp, synthetic construct
  source 1..142: mol_type = other DNA
aatgggtgcgtggggtgatctaatgggtgcgtggggtacgctaatgggtgcgtggggtgccgctaatgggtgcgtggggtgctttaatgggtgcgtggggtgatctaatgggtgcgtggggtacgctaatgggtgcgtgggg

SEQ ID NO: 8912 - DNA, 142 bp, synthetic construct
  source 1..142: mol_type = other DNA
ccccacgcacccctctgatctccccacgcacccctctacgctccccacgcacccctctgccgctccccacgcacccctctgctttccccacgcacccctctgatctccccacgcacccctctacgctccccacgcacccctc

SEQ ID NO: 8913 - DNA, 142 bp, synthetic construct
  source 1..142: mol_type = other DNA
gaggggtgcgtggggtgatctgaggggtgcgtggggtacgctgaggggtgcgtggggtgccgctgaggggtgcgtggggtgctttgaggggtgcgtggggtgatctgaggggtgcgtggggtacgctgaggggtgcgtgggg

SEQ ID NO: 8914 - DNA, 142 bp, synthetic construct
  source 1..142: mol_type = other DNA
ccccacgcacccctttgatctccccacgcacccctttacgctccccacgcacccctttgccgctccccacgcacccctttgctttccccacgcacccctttgatctccccacgcacccctttacgctccccacgcacccctt

SEQ ID NO: 8915 - DNA, 142 bp, synthetic construct
  source 1..142: mol_type = other DNA
aaggggtgcgtggggtgatctaaggggtgcgtggggtacgctaaggggtgcgtggggtgccgctaaggggtgcgtggggtgctttaaggggtgcgtggggtgatctaaggggtgcgtggggtacgctaaggggtgcgtgggg

SEQ ID NO: 8916 - DNA, 145 bp, synthetic construct
  source 1..145: mol_type = other DNA
gctgttccatctgccgccctacgctgctgttccatctgccgccctgccgctgctgttccatctgccgccctgctttgctgttccatctgccgccctgatctgctgttccatctgccgccctacgctgctgttccatctgccgccc

SEQ ID NO: 8917 - DNA, 145 bp, synthetic construct
  source 1..145: mol_type = other DNA
gggcggcagatggaacagctacgctgggcggcagatggaacagctgccgctgggcggcagatggaacagctgctttgggcggcagatggaacagctgatctgggcggcagatggaacagctacgctgggcggcagatggaacagc

SEQ ID NO: 8918 - DNA, 145 bp, synthetic construct
  source 1..145: mol_type = other DNA
gctcttccatctgccgccctacgctgctcttccatctgccgccctgccgctgctcttccatctgccgccctgctttgctcttccatctgccgccctgatctgctcttccatctgccgccctacgctgctcttccatctgccgccc

SEQ ID NO: 8919 - DNA, 145 bp, synthetic construct
  source 1..145: mol_type = other DNA
gggcggcagatggaagagctacgctgggcggcagatggaagagctgccgctgggcggcagatggaagagctgctttgggcggcagatggaagagctgatctgggcggcagatggaagagctacgctgggcggcagatggaagagc

SEQ ID NO: 8920 - DNA, 140 bp, synthetic construct
  source 1..140: mol_type = other DNA
accggaagtatgccgctaccggaagtatgctttaccggaagtatgatctaccggaagtatacgctaccggaagtatgccgctaccggaagtatgctttaccggaagtatgatctaccggaagtatacgctaccggaagta

SEQ ID NO: 8921 - DNA, 140 bp, synthetic construct
  source 1..140: mol_type = other DNA
tacttccggttgccgcttacttccggttgcttttacttccggttgatcttacttccggttacgcttacttccggttgccgcttacttccggttgcttttacttccggttgatcttacttccggttacgcttacttccggt

SEQ ID NO: 8922 - DNA, 140 bp, synthetic construct; identical to SEQ ID NO: 8608
  source 1..140: mol_type = other DNA

SEQ ID NO: 8923 - DNA, 140 bp, synthetic construct; identical to SEQ ID NO: 8609
  source 1..140: mol_type = other DNA

SEQ ID NO: 8924 - DNA, 149 bp, synthetic construct
  source 1..149: mol_type = other DNA
aaccggaaatatgccgctaaccggaaatatgctttaaccggaaatatgatctaaccggaaatatacgctaaccggaaatatgccgctaaccggaaatatgctttaaccggaaatatgatctaaccggaaatatacgctaaccggaaata

SEQ ID NO: 8925 - DNA, 149 bp, synthetic construct
  source 1..149: mol_type = other DNA
tatttccggtttgccgcttatttccggtttgcttttatttccggtttgatcttatttccggtttacgcttatttccggtttgccgcttatttccggtttgcttttatttccggtttgatcttatttccggtttacgcttatttccggtt

SEQ ID NO: 8926 - DNA, 149 bp, synthetic construct
  source 1..149: mol_type = other DNA
aaccggaaatgtgccgctaaccggaaatgtgctttaaccggaaatgtgatctaaccggaaatgtacgctaaccggaaatgtgccgctaaccggaaatgtgctttaaccggaaatgtgatctaaccggaaatgtacgctaaccggaaatg

SEQ ID NO: 8927 - DNA, 149 bp, synthetic construct
  source 1..149: mol_type = other DNA
catttccggtttgccgctcatttccggtttgctttcatttccggtttgatctcatttccggtttacgctcatttccggtttgccgctcatttccggtttgctttcatttccggtttgatctcatttccggtttacgctcatttccggtt

SEQ ID NO: 8928 - DNA, 140 bp, synthetic construct
  source 1..140: mol_type = other DNA
ccacgcccactgccgctccacgcccactgctttccacgcccactgatctccacgcccactacgctccacgcccactgccgctccacgcccactgctttccacgcccactgatctccacgcccactacgctccacgcccac

SEQ ID NO: 8929 - DNA, 140 bp, synthetic construct
  source 1..140: mol_type = other DNA
gtgggcgtggtgccgctgtgggcgtggtgctttgtgggcgtggtgatctgtgggcgtggtacgctgtgggcgtggtgccgctgtgggcgtggtgctttgtgggcgtggtgatctgtgggcgtggtacgctgtgggcgtgg

SEQ ID NO: 8930 - DNA, 140 bp, synthetic construct
  source 1..140: mol_type = other DNA
ccacgccccctgccgctccacgccccctgctttccacgccccctgatctccacgccccctacgctccacgccccctgccgctccacgccccctgctttccacgccccctgatctccacgccccctacgctccacgccccc

SEQ ID NO: 8931 - DNA, 140 bp, synthetic construct
  source 1..140: mol_type = other DNA
gggggcgtggtgccgctgggggcgtggtgctttgggggcgtggtgatctgggggcgtggtacgctgggggcgtggtgccgctgggggcgtggtgctttgggggcgtggtgatctgggggcgtggtacgctgggggcgtgg

SEQ ID NO: 8932 - DNA, 140 bp, synthetic construct
  source 1..140: mol_type = other DNA
acgaggaagttgccgctacgaggaagttgctttacgaggaagttgatctacgaggaagttacgctacgaggaagttgccgctacgaggaagttgctttacgaggaagttgatctacgaggaagttacgctacgaggaagt

SEQ ID NO: 8933 - DNA, 140 bp, synthetic construct
  source 1..140: mol_type = other DNA
acttcctcgttgccgctacttcctcgttgctttacttcctcgttgatctacttcctcgttacgctacttcctcgttgccgctacttcctcgttgctttacttcctcgttgatctacttcctcgttacgctacttcctcgt

SEQ ID NO: 8934 - DNA, 140 bp, synthetic construct
  source 1..140: mol_type = other DNA
acgcggaagttgccgctacgcggaagttgctttacgcggaagttgatctacgcggaagttacgctacgcggaagttgccgctacgcggaagttgctttacgcggaagttgatctacgcggaagttacgctacgcggaagt

SEQ ID NO: 8935 - DNA, 140 bp, synthetic construct
  source 1..140: mol_type = other DNA
acttccgcgttgccgctacttccgcgttgctttacttccgcgttgatctacttccgcgttacgctacttccgcgttgccgctacttccgcgttgctttacttccgcgttgatctacttccgcgttacgctacttccgcgt

SEQ ID NO: 8936 - DNA, 140 bp, synthetic construct; identical to SEQ ID NO: 8626
  source 1..140: mol_type = other DNA

SEQ ID NO: 8937 - DNA, 140 bp, synthetic construct; identical to SEQ ID NO: 8627
  source 1..140: mol_type = other DNA

SEQ ID NO: 8938 - DNA, 140 bp, synthetic construct
  source 1..140: mol_type = other DNA
acccggaagttgccgctacccggaagttgctttacccggaagttgatctacccggaagttacgctacccggaagttgccgctacccggaagttgctttacccggaagttgatctacccggaagttacgctacccggaagt

SEQ ID NO: 8939 - DNA, 140 bp, synthetic construct
  source 1..140: mol_type = other DNA
acttccgggttgccgctacttccgggttgctttacttccgggttgatctacttccgggttacgctacttccgggttgccgctacttccgggttgctttacttccgggttgatctacttccgggttacgctacttccgggt

SEQ ID NO: 8940 - DNA, 140 bp, synthetic construct; identical to SEQ ID NO: 8426
  source 1..140: mol_type = other DNA

SEQ ID NO: 8941 - DNA, 140 bp, synthetic construct; identical to SEQ ID NO: 8427
  source 1..140: mol_type = other DNA

SEQ ID NO: 8942 - DNA, 140 bp, synthetic construct
  source 1..140: mol_type = other DNA
acaaggaagttgccgctacaaggaagttgctttacaaggaagttgatctacaaggaagttacgctacaaggaagttgccgctacaaggaagttgctttacaaggaagttgatctacaaggaagttacgctacaaggaagt

SEQ ID NO: 8943 - DNA, 140 bp, synthetic construct
  source 1..140: mol_type = other DNA
acttccttgttgccgctacttccttgttgctttacttccttgttgatctacttccttgttacgctacttccttgttgccgctacttccttgttgctttacttccttgttgatctacttccttgttacgctacttccttgt

SEQ ID NO: 8944 - DNA, 140 bp, synthetic construct; identical to SEQ ID NO: 8626
  source 1..140: mol_type = other DNA

SEQ ID NO: 8945 - DNA, 140 bp, synthetic construct; identical to SEQ ID NO: 8627
  source 1..140: mol_type = other DNA

SEQ ID NO: 8946 - DNA, 140 bp, synthetic construct; identical to SEQ ID NO: 8932
  source 1..140: mol_type = other DNA

SEQ ID NO: 8947 - DNA, 140 bp, synthetic construct; identical to SEQ ID NO: 8933
  source 1..140: mol_type = other DNA

SEQ ID NO: 8948 - DNA, 125 bp, synthetic construct
  source 1..125: mol_type = other DNA
gaatggaaaaaatgagtcattgccgctgaatggaaaaaatgagtcattgctttgaatggaaaaaatgagtcattgatctgaatggaaaaaatgagtcattacgctgaatggaaaaaatgagtcat

SEQ ID NO: 8949 - DNA, 125 bp, synthetic construct
  source 1..125: mol_type = other DNA
atgactcattttttccattctgccgctatgactcattttttccattctgctttatgactcattttttccattctgatctatgactcattttttccattctacgctatgactcattttttccattc

SEQ ID NO: 8950 - DNA, 140 bp, synthetic construct
  source 1..140: mol_type = other DNA
tgacagtgcttttgacagtgatcttgacagtacgcttgacagtgccgcttgacagtgcttttgacagtgatcttgacagtacgcttgacagtgccgcttgacagtgcttttgacagtgatcttgacagtacgcttgacag

SEQ ID NO: 8951 - DNA, 140 bp, synthetic construct
  source 1..140: mol_type = other DNA
ctgtcatgctttctgtcatgatctctgtcatacgctctgtcatgccgctctgtcatgctttctgtcatgatctctgtcatacgctctgtcatgccgctctgtcatgctttctgtcatgatctctgtcatacgctctgtca

SEQ ID NO: 8952 - DNA, 133 bp, synthetic construct
  source 1..133: mol_type = other DNA
gggaaaaagaacagatgtacgctgggaaaaagaacagatgtgccgctgggaaaaagaacagatgtgctttgggaaaaagaacagatgtgatctgggaaaaagaacagatgtacgctgggaaaaagaacagatg

SEQ ID NO: 8953 - DNA, 133 bp, synthetic construct
  source 1..133: mol_type = other DNA
catctgttctttttccctacgctcatctgttctttttccctgccgctcatctgttctttttccctgctttcatctgttctttttccctgatctcatctgttctttttccctacgctcatctgttctttttccc

SEQ ID NO: 8954 - DNA, 133 bp, synthetic construct
  source 1..133: mol_type = other DNA
gggaaaaagaacagctgtacgctgggaaaaagaacagctgtgccgctgggaaaaagaacagctgtgctttgggaaaaagaacagctgtgatctgggaaaaagaacagctgtacgctgggaaaaagaacagctg

SEQ ID NO: 8955 - DNA, 133 bp, synthetic construct
  source 1..133: mol_type = other DNA
cagctgttctttttccctacgctcagctgttctttttccctgccgctcagctgttctttttccctgctttcagctgttctttttccctgatctcagctgttctttttccctacgctcagctgttctttttccc

SEQ ID NO: 8956 - DNA, 133 bp, synthetic construct
  source 1..133: mol_type = other DNA
gggaaaaagaccagatgtacgctgggaaaaagaccagatgtgccgctgggaaaaagaccagatgtgctttgggaaaaagaccagatgtgatctgggaaaaagaccagatgtacgctgggaaaaagaccagatg

SEQ ID NO: 8957 - DNA, 133 bp, synthetic construct
  source 1..133: mol_type = other DNA
catctggtctttttccctacgctcatctggtctttttccctgccgctcatctggtctttttccctgctttcatctggtctttttccctgatctcatctggtctttttccctacgctcatctggtctttttccc

SEQ ID NO: 8958 - DNA, 133 bp, synthetic construct
  source 1..133: mol_type = other DNA
gggaaaaagaccagctgtacgctgggaaaaagaccagctgtgccgctgggaaaaagaccagctgtgctttgggaaaaagaccagctgtgatctgggaaaaagaccagctgtacgctgggaaaaagaccagctg

SEQ ID NO: 8959 - DNA, 133 bp, synthetic construct
  source 1..133: mol_type = other DNA
cagctggtctttttccctacgctcagctggtctttttccctgccgctcagctggtctttttccctgctttcagctggtctttttccctgatctcagctggtctttttccctacgctcagctggtctttttccc

SEQ ID NO: 8960 - DNA, 133 bp, synthetic construct
  source 1..133: mol_type = other DNA
gggaaaaaggacagatgtacgctgggaaaaaggacagatgtgccgctgggaaaaaggacagatgtgctttgggaaaaaggacagatgtgatctgggaaaaaggacagatgtacgctgggaaaaaggacagatg

SEQ ID NO: 8961 - DNA, 133 bp, synthetic construct
  source 1..133: mol_type = other DNA
catctgtcctttttccctacgctcatctgtcctttttccctgccgctcatctgtcctttttccctgctttcatctgtcctttttccctgatctcatctgtcctttttccctacgctcatctgtcctttttccc

SEQ ID NO: 8962 - DNA, 133 bp, synthetic construct
  source 1..133: mol_type = other DNA
gggaaaaaggacagctgtacgctgggaaaaaggacagctgtgccgctgggaaaaaggacagctgtgctttgggaaaaaggacagctgtgatctgggaaaaaggacagctgtacgctgggaaaaaggacagctg

SEQ ID NO: 8963 - DNA, 133 bp, synthetic construct
  source 1..133: mol_type = other DNA
cagctgtcctttttccctacgctcagctgtcctttttccctgccgctcagctgtcctttttccctgctttcagctgtcctttttccctgatctcagctgtcctttttccctacgctcagctgtcctttttccc

SEQ ID NO: 8964 - DNA, 133 bp, synthetic construct
  source 1..133: mol_type = other DNA
gggaaaaaggccagatgtacgctgggaaaaaggccagatgtgccgctgggaaaaaggccagatgtgctttgggaaaaaggccagatgtgatctgggaaaaaggccagatgtacgctgggaaaaaggccagatg

SEQ ID NO: 8965 - DNA, 133 bp, synthetic construct
  source 1..133: mol_type = other DNA
catctggcctttttccctacgctcatctggcctttttccctgccgctcatctggcctttttccctgctttcatctggcctttttccctgatctcatctggcctttttccctacgctcatctggcctttttccc

SEQ ID NO: 8966 - DNA, 133 bp, synthetic construct
  source 1..133: mol_type = other DNA
gggaaaaaggccagctgtacgctgggaaaaaggccagctgtgccgctgggaaaaaggccagctgtgctttgggaaaaaggccagctgtgatctgggaaaaaggccagctgtacgctgggaaaaaggccagctg

SEQ ID NO: 8967 - DNA, 133 bp, synthetic construct
  source 1..133: mol_type = other DNA
cagctggcctttttccctacgctcagctggcctttttccctgccgctcagctggcctttttccctgctttcagctggcctttttccctgatctcagctggcctttttccctacgctcagctggcctttttccc

SEQ ID NO: 8968 - DNA, 133 bp, synthetic construct
  source 1..133: mol_type = other DNA
gggaaaaggaacagatgtacgctgggaaaaggaacagatgtgccgctgggaaaaggaacagatgtgctttgggaaaaggaacagatgtgatctgggaaaaggaacagatgtacgctgggaaaaggaacagatg

SEQ ID NO: 8969 - DNA, 133 bp, synthetic construct
  source 1..133: mol_type = other DNA
catctgttccttttccctacgctcatctgttccttttccctgccgctcatctgttccttttccctgctttcatctgttccttttccctgatctcatctgttccttttccctacgctcatctgttccttttccc

SEQ ID NO: 8970 - DNA, 133 bp, synthetic construct
  source 1..133: mol_type = other DNA
gggaaaaggaacagctgtacgctgggaaaaggaacagctgtgccgctgggaaaaggaacagctgtgctttgggaaaaggaacagctgtgatctgggaaaaggaacagctgtacgctgggaaaaggaacagctg

SEQ ID NO: 8971 - DNA, 133 bp, synthetic construct
  source 1..133: mol_type = other DNA
cagctgttccttttccctacgctcagctgttccttttccctgccgctcagctgttccttttccctgctttcagctgttccttttccctgatctcagctgttccttttccctacgctcagctgttccttttccc

SEQ ID NO: 8972 - DNA, 133 bp, synthetic construct
  source 1..133: mol_type = other DNA
gggaaaaggaccagatgtacgctgggaaaaggaccagatgtgccgctgggaaaaggaccagatgtgctttgggaaaaggaccagatgtgatctgggaaaaggaccagatgtacgctgggaaaaggaccagatg

SEQ ID NO: 8973 - DNA, 133 bp, synthetic construct
  source 1..133: mol_type = other DNA
catctggtccttttccctacgctcatctggtccttttccctgccgctcatctggtccttttccctgctttcatctggtccttttccctgatctcatctggtccttttccctacgctcatctggtccttttccc

SEQ ID NO: 8974 - DNA, 133 bp, synthetic construct
  source 1..133: mol_type = other DNA
gggaaaaggaccagctgtacgctgggaaaaggaccagctgtgccgctgggaaaaggaccagctgtgctttgggaaaaggaccagctgtgatctgggaaaaggaccagctgtacgctgggaaaaggaccagctg

SEQ ID NO: 8975 - DNA, 133 bp, synthetic construct
  source 1..133: mol_type = other DNA
cagctggtccttttccctacgctcagctggtccttttccctgccgctcagctggtccttttccctgctttcagctggtccttttccctgatctcagctggtccttttccctacgctcagctggtccttttccc

SEQ ID NO: 8976 - DNA, 133 bp, synthetic construct
  source 1..133: mol_type = other DNA
gggaaaagggacagatgtacgctgggaaaagggacagatgtgccgctgggaaaagggacagatgtgctttgggaaaagggacagatgtgatctgggaaaagggacagatgtacgctgggaaaagggacagatg

SEQ ID NO: 8977 - DNA, 133 bp, synthetic construct
  source 1..133: mol_type = other DNA
catctgtcccttttccctacgctcatctgtcccttttccctgccgctcatctgtcccttttccctgctttcatctgtcccttttccctgatctcatctgtcccttttccctacgctcatctgtcccttttccc

SEQ ID NO: 8978 - DNA, 133 bp, synthetic construct
  source 1..133: mol_type = other DNA
gggaaaagggacagctgtacgctgggaaaagggacagctgtgccgctgggaaaagggacagctgtgctttgggaaaagggacagctgtgatctgggaaaagggacagctgtacgctgggaaaagggacagctg

SEQ ID NO: 8979 - DNA, 133 bp, synthetic construct
  source 1..133: mol_type = other DNA
cagctgtcccttttccctacgctcagctgtcccttttccctgccgctcagctgtcccttttccctgctttcagctgtcccttttccctgatctcagctgtcccttttccctacgctcagctgtcccttttccc

SEQ ID NO: 8980 - DNA, 133 bp, synthetic construct
  source 1..133: mol_type = other DNA
gggaaaagggccagatgtacgctgggaaaagggccagatgtgccgctgggaaaagggccagatgtgctttgggaaaagggccagatgtgatctgggaaaagggccagatgtacgctgggaaaagggccagatg

SEQ ID NO: 8981 - DNA, 133 bp, synthetic construct
  source 1..133: mol_type = other DNA
catctggcccttttccctacgctcatctggcccttttccctgccgctcatctggcccttttccctgctttcatctggcccttttccctgatctcatctggcccttttccctacgctcatctggcccttttccc

SEQ ID NO: 8982 - DNA, 133 bp, synthetic construct
  source 1..133: mol_type = other DNA
gggaaaagggccagctgtacgctgggaaaagggccagctgtgccgctgggaaaagggccagctgtgctttgggaaaagggccagctgtgatctgggaaaagggccagctgtacgctgggaaaagggccagctg

SEQ ID NO: 8983 - DNA, 133 bp, synthetic construct
  source 1..133: mol_type = other DNA
cagctggcccttttccctacgctcagctggcccttttccctgccgctcagctggcccttttccctgctttcagctggcccttttccctgatctcagctggcccttttccctacgctcagctggcccttttccc

SEQ ID NO: 8984 - DNA, 133 bp, synthetic construct
  source 1..133: mol_type = other DNA
gggaaagagaacagatgtacgctgggaaagagaacagatgtgccgctgggaaagagaacagatgtgctttgggaaagagaacagatgtgatctgggaaagagaacagatgtacgctgggaaagagaacagatg

SEQ ID NO: 8985 - DNA, 133 bp, synthetic construct
  source 1..133: mol_type = other DNA
catctgttctctttccctacgctcatctgttctctttccctgccgctcatctgttctctttccctgctttcatctgttctctttccctgatctcatctgttctctttccctacgctcatctgttctctttccc

SEQ ID NO: 8986 - DNA, 133 bp, synthetic construct
  source 1..133: mol_type = other DNA
gggaaagagaacagctgtacgctgggaaagagaacagctgtgccgctgggaaagagaacagctgtgctttgggaaagagaacagctgtgatctgggaaagagaacagctgtacgctgggaaagagaacagctg

SEQ ID NO: 8987 - DNA, 133 bp, synthetic construct
  source 1..133: mol_type = other DNA
cagctgttctctttccctacgctcagctgttctctttccctgccgctcagctgttctctttccctgctttcagctgttctctttccctgatctcagctgttctctttccctacgctcagctgttctctttccc

SEQ ID NO: 8988 - DNA, 133 bp, synthetic construct
  source 1..133: mol_type = other DNA
gggaaagagaccagatgtacgctgggaaagagaccagatgtgccgctgggaaagagaccagatgtgctttgggaaagagaccagatgtgatctgggaaagagaccagatgtacgctgggaaagagaccagatg

SEQ ID NO: 8989 - DNA, 133 bp, synthetic construct
  source 1..133: mol_type = other DNA
catctggtctctttccctacgctcatctggtctctttccctgccgctcatctggtctctttccctgctttcatctggtctctttccctgatctcatctggtctctttccctacgctcatctggtctctttccc

SEQ ID NO: 8990 - DNA, 133 bp, synthetic construct
  source 1..133: mol_type = other DNA
gggaaagagaccagctgtacgctgggaaagagaccagctgtgccgctgggaaagagaccagctgtgctttgggaaagagaccagctgtgatctgggaaagagaccagctgtacgctgggaaagagaccagctg

SEQ ID NO: 8991 - DNA, 133 bp, synthetic construct
  source 1..133: mol_type = other DNA
cagctggtctctttccctacgctcagctggtctctttccctgccgctcagctggtctctttccctgctttcagctggtctctttccctgatctcagctggtctctttccctacgctcagctggtctctttccc

SEQ ID NO: 8992 - DNA, 133 bp, synthetic construct
  source 1..133: mol_type = other DNA
gggaaagaggacagatgtacgctgggaaagaggacagatgtgccgctgggaaagaggacagatgtgctttgggaaagaggacagatgtgatctgggaaagaggacagatgtacgctgggaaagaggacagatg

SEQ ID NO: 8993 - DNA, 133 bp, synthetic construct
  source 1..133: mol_type = other DNA
catctgtcctctttccctacgctcatctgtcctctttccctgccgctcatctgtcctctttccctgctttcatctgtcctctttccctgatctcatctgtcctctttccctacgctcatctgtcctctttccc

SEQ ID NO: 8994 - DNA, 133 bp, synthetic construct
  source 1..133: mol_type = other DNA
gggaaagaggacagctgtacgctgggaaagaggacagctgtgccgctgggaaagaggacagctgtgctttgggaaagaggacagctgtgatctgggaaagaggacagctgtacgctgggaaagaggacagctg

SEQ ID NO: 8995 - DNA, 133 bp, synthetic construct
  source 1..133: mol_type = other DNA
cagctgtcctctttccctacgctcagctgtcctctttccctgccgctcagctgtcctctttccctgctttcagctgtcctctttccctgatctcagctgtcctctttccctacgctcagctgtcctctttccc

SEQ ID NO: 8996 - DNA, 133 bp, synthetic construct
  source 1..133: mol_type = other DNA
gggaaagaggccagatgtacgctgggaaagaggccagatgtgccgctgggaaagaggccagatgtgctttgggaaagaggccagatgtgatctgggaaagaggccagatgtacgctgggaaagaggccagatg

SEQ ID NO: 8997 - DNA, 133 bp, synthetic construct
  source 1..133: mol_type = other DNA
catctggcctctttccctacgctcatctggcctctttccctgccgctcatctggcctctttccctgctttcatctggcctctttccctgatctcatctggcctctttccctacgctcatctggcctctttccc

SEQ ID NO: 8998 - DNA, 133 bp, synthetic construct
  source 1..133: mol_type = other DNA
gggaaagaggccagctgtacgctgggaaagaggccagctgtgccgctgggaaagaggccagctgtgctttgggaaagaggccagctgtgatctgggaaagaggccagctgtacgctgggaaagaggccagctg

SEQ ID NO: 8999 - DNA, 133 bp, synthetic construct
  source 1..133: mol_type = other DNA
cagctggcctctttccctacgctcagctggcctctttccctgccgctcagctggcctctttccctgctttcagctggcctctttccctgatctcagctggcctctttccctacgctcagctggcctctttccc

SEQ ID NO: 9000 - DNA, 133 bp, synthetic construct
  source 1..133: mol_type = other DNA
gggaaagggaacagatgtacgctgggaaagggaacagatgtgccgctgggaaagggaacagatgtgctttgggaaagggaacagatgtgatctgggaaagggaacagatgtacgctgggaaagggaacagatg

SEQ ID NO: 9001 - DNA, 133 bp, synthetic construct
  source 1..133: mol_type = other DNA
catctgttccctttccctacgctcatctgttccctttccctgccgctcatctgttccctttccctgctttcatctgttccctttccctgatctcatctgttccctttccctacgctcatctgttccctttccc

SEQ ID NO: 9002 - DNA, 133 bp, synthetic construct
  source 1..133: mol_type = other DNA
gggaaagggaacagctgtacgctgggaaagggaacagctgtgccgctgggaaagggaacagctgtgctttgggaaagggaacagctgtgatctgggaaagggaacagctgtacgctgggaaagggaacagctg

SEQ ID NO: 9003 - DNA, 133 bp, synthetic construct
  source 1..133: mol_type = other DNA
cagctgttccctttccctacgctcagctgttccctttccctgccgctcagctgttccctttccctgctttcagctgttccctttccctgatctcagctgttccctttccctacgctcagctgttccctttccc

SEQ ID NO: 9004 - DNA, 133 bp, synthetic construct
  source 1..133: mol_type = other DNA
gggaaagggaccagatgtacgctgggaaagggaccagatgtgccgctgggaaagggaccagatgtgctttgggaaagggaccagatgtgatctgggaaagggaccagatgtacgctgggaaagggaccagatg

SEQ ID NO: 9005 - DNA, 133 bp, synthetic construct
  source 1..133: mol_type = other DNA
catctggtccctttccctacgctcatctggtccctttccctgccgctcatctggtccctttccctgctttcatctggtccctttccctgatctcatctggtccctttccctacgctcatctggtccctttccc

SEQ ID NO: 9006 - DNA, 133 bp, synthetic construct
  source 1..133: mol_type = other DNA
gggaaagggaccagctgtacgctgggaaagggaccagctgtgccgctgggaaagggaccagctgtgctttgggaaagggaccagctgtgatctgggaaagggaccagctgtacgctgggaaagggaccagctg

SEQ ID NO: 9007 - DNA, 133 bp, synthetic construct
  source 1..133: mol_type = other DNA
cagctggtccctttccctacgctcagctggtccctttccctgccgctcagctggtccctttccctgctttcagctggtccctttccctgatctcagctggtccctttccctacgctcagctggtccctttccc

SEQ ID NO: 9008 - DNA, 133 bp, synthetic construct
  source 1..133: mol_type = other DNA
gggaaaggggacagatgtacgctgggaaaggggacagatgtgccgctgggaaaggggacagatgtgctttgggaaaggggacagatgtgatctgggaaaggggacagatgtacgctgggaaaggggacagatg

SEQ ID NO: 9009 - DNA, 133 bp, synthetic construct
  source 1..133: mol_type = other DNA
catctgtcccctttccctacgctcatctgtcccctttccctgccgctcatctgtcccctttccctgctttcatctgtcccctttccctgatctcatctgtcccctttccctacgctcatctgtcccctttccc

SEQ ID NO: 9010 - DNA, 133 bp, synthetic construct
  source 1..133: mol_type = other DNA
gggaaaggggacagctgtacgctgggaaaggggacagctgtgccgctgggaaaggggacagctgtgctttgggaaaggggacagctgtgatctgggaaaggggacagctgtacgctgggaaaggggacagctg

SEQ ID NO: 9011 - DNA, 133 bp, synthetic construct
  source 1..133: mol_type = other DNA
cagctgtcccctttccctacgctcagctgtcccctttccctgccgctcagctgtcccctttccctgctttcagctgtcccctttccctgatctcagctgtcccctttccctacgctcagctgtcccctttccc

SEQ ID NO: 9012 - DNA, 133 bp, synthetic construct
  source 1..133: mol_type = other DNA
gggaaaggggccagatgtacgctgggaaaggggccagatgtgccgctgggaaaggggccagatgtgctttgggaaaggggccagatgtgatctgggaaaggggccagatgtacgctgggaaaggggccagatg

SEQ ID NO: 9013 - DNA, 133 bp, synthetic construct
  source 1..133: mol_type = other DNA
catctggcccctttccctacgctcatctggcccctttccctgccgctcatctggcccctttccctgctttcatctggcccctttccctgatctcatctggcccctttccctacgctcatctggcccctttccc

SEQ ID NO: 9014 - DNA, 133 bp, synthetic construct
  source 1..133: mol_type = other DNA
gggaaaggggccagctgtacgctgggaaaggggccagctgtgccgctgggaaaggggccagctgtgctttgggaaaggggccagctgtgatctgggaaaggggccagctgtacgctgggaaaggggccagctg

SEQ ID NO: 9015 - DNA, 133 bp, synthetic construct
  source 1..133: mol_type = other DNA
cagctggcccctttccctacgctcagctggcccctttccctgccgctcagctggcccctttccctgctttcagctggcccctttccctgatctcagctggcccctttccctacgctcagctggcccctttccc

SEQ ID NO: 9016 - DNA, 133 bp, synthetic construct
  source 1..133: mol_type = other DNA
ggggaaaagaacagatgtacgctggggaaaagaacagatgtgccgctggggaaaagaacagatgtgctttggggaaaagaacagatgtgatctggggaaaagaacagatgtacgctggggaaaagaacagatg

SEQ ID NO: 9017 - DNA, 133 bp, synthetic construct
  source 1..133: mol_type = other DNA
catctgttcttttcccctacgctcatctgttcttttcccctgccgctcatctgttcttttcccctgctttcatctgttcttttcccctgatctcatctgttcttttcccctacgctcatctgttcttttcccc

SEQ ID NO: 9018 - DNA, 133 bp, synthetic construct
  source 1..133: mol_type = other DNA
ggggaaaagaacagctgtacgctggggaaaagaacagctgtgccgctggggaaaagaacagctgtgctttggggaaaagaacagctgtgatctggggaaaagaacagctgtacgctggggaaaagaacagctg

SEQ ID NO: 9019 - DNA, 133 bp, synthetic construct
  source 1..133: mol_type = other DNA
cagctgttcttttcccctacgctcagctgttcttttcccctgccgctcagctgttcttttcccctgctttcagctgttcttttcccctgatctcagctgttcttttcccctacgctcagctgttcttttcccc

SEQ ID NO: 9020 - DNA, 133 bp, synthetic construct
  source 1..133: mol_type = other DNA
ggggaaaagaccagatgtacgctggggaaaagaccagatgtgccgctggggaaaagaccagatgtgctttggggaaaagaccagatgtgatctggggaaaagaccagatgtacgctggggaaaagaccagatg

SEQ ID NO: 9021 - DNA, 133 bp, synthetic construct
  source 1..133: mol_type = other DNA
catctggtcttttcccctacgctcatctggtcttttcccctgccgctcatctggtcttttcccctgctttcatctggtcttttcccctgatctcatctggtcttttcccctacgctcatctggtcttttcccc

SEQ ID NO: 9022 - DNA, 133 bp, synthetic construct
  source 1..133: mol_type = other DNA
ggggaaaagaccagctgtacgctggggaaaagaccagctgtgccgctggggaaaagaccagctgtgctttggggaaaagaccagctgtgatctggggaaaagaccagctgtacgctggggaaaagaccagctg

SEQ ID NO: 9023 - DNA, 133 bp, synthetic construct
  source 1..133: mol_type = other DNA
cagctggtcttttcccctacgctcagctggtcttttcccctgccgctcagctggtcttttcccctgctttcagctggtcttttcccctgatctcagctggtcttttcccctacgctcagctggtcttttcccc

SEQ ID NO: 9024 - DNA, 133 bp, synthetic construct
  source 1..133: mol_type = other DNA
ggggaaaaggacagatgtacgctggggaaaaggacagatgtgccgctggggaaaaggacagatgtgctttggggaaaaggacagatgtgatctggggaaaaggacagatgtacgctggggaaaaggacagatg

SEQ ID NO: 9025 - DNA, 133 bp, synthetic construct
  source 1..133: mol_type = other DNA
catctgtccttttcccctacgctcatctgtccttttcccctgccgctcatctgtccttttcccctgctttcatctgtccttttcccctgatctcatctgtccttttcccctacgctcatctgtccttttcccc

SEQ ID NO: 9026 - DNA, 133 bp, synthetic construct
  source 1..133: mol_type = other DNA
ggggaaaaggacagctgtacgctggggaaaaggacagctgtgccgctggggaaaaggacagctgtgctttggggaaaaggacagctgtgatctggggaaaaggacagctgtacgctggggaaaaggacagctg

SEQ ID NO: 9027 - DNA, 133 bp, synthetic construct
  source 1..133: mol_type = other DNA
cagctgtccttttcccctacgctcagctgtccttttcccctgccgctcagctgtccttttcccctgctttcagctgtccttttcccctgatctcagctgtccttttcccctacgctcagctgtccttttcccc

SEQ ID NO: 9028 - DNA, 133 bp, synthetic construct
  source 1..133: mol_type = other DNA
ggggaaaaggccagatgtacgctggggaaaaggccagatgtgccgctggggaaaaggccagatgtgctttggggaaaaggccagatgtgatctggggaaaaggccagatgtacgctggggaaaaggccagatg

SEQ ID NO: 9029 - DNA, 133 bp, synthetic construct
  source 1..133: mol_type = other DNA
catctggccttttcccctacgctcatctggccttttcccctgccgctcatctggccttttcccctgctttcatctggccttttcccctgatctcatctggccttttcccctacgctcatctggccttttcccc

SEQ ID NO: 9030 - DNA, 133 bp, synthetic construct
  source 1..133: mol_type = other DNA
ggggaaaaggccagctgtacgctggggaaaaggccagctgtgccgctggggaaaaggccagctgtgctttggggaaaaggccagctgtgatctggggaaaaggccagctgtacgctggggaaaaggccagctg

SEQ ID NO: 9031 - DNA, 133 bp, synthetic construct
  source 1..133: mol_type = other DNA
cagctggccttttcccctacgctcagctggccttttcccctgccgctcagctggccttttcccctgctttcagctggccttttcccctgatctcagctggccttttcccctacgctcagctggccttttcccc

SEQ ID NO: 9032 - DNA, 133 bp, synthetic construct
  source 1..133: mol_type = other DNA
ggggaaaggaacagatgtacgctggggaaaggaacagatgtgccgctggggaaaggaacagatgtgctttggggaaaggaacagatgtgatctggggaaaggaacagatgtacgctggggaaaggaacagatg

SEQ ID NO: 9033 - DNA, 133 bp, synthetic construct
  source 1..133: mol_type = other DNA
catctgttcctttcccctacgctcatctgttcctttcccctgccgctcatctgttcctttcccctgctttcatctgttcctttcccctgatctcatctgttcctttcccctacgctcatctgttcctttcccc

SEQ ID NO: 9034 - DNA, 133 bp, synthetic construct
  source 1..133: mol_type = other DNA
ggggaaaggaacagctgtacgctggggaaaggaacagctgtgccgctggggaaaggaacagctgtgctttggggaaaggaacagctgtgatctggggaaaggaacagctgtacgctggggaaaggaacagctg

SEQ ID NO: 9035 - DNA, 133 bp, synthetic construct
  source 1..133: mol_type = other DNA
cagctgttcctttcccctacgctcagctgttcctttcccctgccgctcagctgttcctttcccctgctttcagctgttcctttcccctgatctcagctgttcctttcccctacgctcagctgttcctttcccc

SEQ ID NO: 9036 - DNA, 133 bp, synthetic construct
  source 1..133: mol_type = other DNA
ggggaaaggaccagatgtacgctggggaaaggaccagatgtgccgctggggaaaggaccagatgtgctttggggaaaggaccagatgtgatctggggaaaggaccagatgtacgctggggaaaggaccagatg

SEQ ID NO: 9037 - DNA, 133 bp, synthetic construct
  source 1..133: mol_type = other DNA
catctggtcctttcccctacgctcatctggtcctttcccctgccgctcatctggtcctttcccctgctttcatctggtcctttcccctgatctcatctggtcctttcccctacgctcatctggtcctttcccc

SEQ ID NO: 9038 - DNA, 133 bp, synthetic construct
  source 1..133: mol_type = other DNA
ggggaaaggaccagctgtacgctggggaaaggaccagctgtgccgctggggaaaggaccagctgtgctttggggaaaggaccagctgtgatctggggaaaggaccagctgtacgctggggaaaggaccagctg

SEQ ID NO: 9039 - DNA, 133 bp, synthetic construct
  source 1..133: mol_type = other DNA
cagctggtcctttcccctacgctcagctggtcctttcccctgccgctcagctggtcctttcccctgctttcagctggtcctttcccctgatctcagctggtcctttcccctacgctcagctggtcctttcccc

SEQ ID NO: 9040 - DNA, 133 bp, synthetic construct
  source 1..133: mol_type = other DNA
ggggaaagggacagatgtacgctggggaaagggacagatgtgccgctggggaaagggacagatgtgctttggggaaagggacagatgtgatctggggaaagggacagatgtacgctggggaaagggacagatg

SEQ ID NO: 9041 - DNA, 133 bp, synthetic construct
  source 1..133: mol_type = other DNA
catctgtccctttcccctacgctcatctgtccctttcccctgccgctcatctgtccctttcccctgctttcatctgtccctttcccctgatctcatctgtccctttcccctacgctcatctgtccctttcccc

SEQ ID NO: 9042 - DNA, 133 bp, synthetic construct
  source 1..133: mol_type = other DNA
ggggaaagggacagctgtacgctggggaaagggacagctgtgccgctggggaaagggacagctgtgctttggggaaagggacagctgtgatctggggaaagggacagctgtacgctggggaaagggacagctg

SEQ ID NO: 9043 - DNA, 133 bp, synthetic construct
  source 1..133: mol_type = other DNA
cagctgtccctttcccctacgctcagctgtccctttcccctgccgctcagctgtccctttcccctgctttcagctgtccctttcccctgatctcagctgtccctttcccctacgctcagctgtccctttcccc

SEQ ID NO: 9044 - DNA, 133 bp, synthetic construct
  source 1..133: mol_type = other DNA
ggggaaagggccagatgtacgctggggaaagggccagatgtgccgctggggaaagggccagatgtgctttggggaaagggccagatgtgatctggggaaagggccagatgtacgctggggaaagggccagatg

SEQ ID NO: 9045 - DNA, 133 bp, synthetic construct
  source 1..133: mol_type = other DNA
catctggccctttcccctacgctcatctggccctttcccctgccgctcatctggccctttcccctgctttcatctggccctttcccctgatctcatctggccctttcccctacgctcatctggccctttcccc

SEQ ID NO: 9046 - DNA, 133 bp, synthetic construct
  source 1..133: mol_type = other DNA
ggggaaagggccagctgtacgctggggaaagggccagctgtgccgctggggaaagggccagctgtgctttggggaaagggccagctgtgatctggggaaagggccagctgtacgctggggaaagggccagctg

SEQ ID NO: 9047 - DNA, 133 bp, synthetic construct
  source 1..133: mol_type = other DNA
cagctggccctttcccctacgctcagctggccctttcccctgccgctcagctggccctttcccctgctttcagctggccctttcccctgatctcagctggccctttcccctacgctcagctggccctttcccc

SEQ ID NO: 9048 - DNA, 133 bp, synthetic construct
  source 1..133: mol_type = other DNA
ggggaagagaacagatgtacgctggggaagagaacagatgtgccgctggggaagagaacagatgtgctttggggaagagaacagatgtgatctggggaagagaacagatgtacgctggggaagagaacagatg

SEQ ID NO: 9049 - DNA, 133 bp, synthetic construct
  source 1..133: mol_type = other DNA
catctgttctcttcccctacgctcatctgttctcttcccctgccgctcatctgttctcttcccctgctttcatctgttctcttcccctgatctcatctgttctcttcccctacgctcatctgttctcttcccc

SEQ ID NO: 9050 - DNA, 133 bp, synthetic construct
  source 1..133: mol_type = other DNA
ggggaagagaacagctgtacgctggggaagagaacagctgtgccgctggggaagagaacagctgtgctttggggaagagaacagctgtgatctggggaagagaacagctgtacgctggggaagagaacagctg

SEQ ID NO: 9051 - DNA, 133 bp, synthetic construct
  source 1..133: mol_type = other DNA
cagctgttctcttcccctacgctcagctgttctcttcccctgccgctcagctgttctcttcccctgctttcagctgttctcttcccctgatctcagctgttctcttcccctacgctcagctgttctcttcccc

SEQ ID NO: 9052 - DNA, 133 bp, synthetic construct
  source 1..133: mol_type = other DNA
ggggaagagaccagatgtacgctggggaagagaccagatgtgccgctggggaagagaccagatgtgctttggggaagagaccagatgtgatctggggaagagaccagatgtacgctggggaagagaccagatg

SEQ ID NO: 9053 - DNA, 133 bp, synthetic construct
  source 1..133: mol_type = other DNA
catctggtctcttcccctacgctcatctggtctcttcccctgccgctcatctggtctcttcccctgctttcatctggtctcttcccctgatctcatctggtctcttcccctacgctcatctggtctcttcccc

SEQ ID NO: 9054 - DNA, 133 bp, synthetic construct
  source 1..133: mol_type = other DNA
ggggaagagaccagctgtacgctggggaagagaccagctgtgccgctggggaagagaccagctgtgctttggggaagagaccagctgtgatctggggaagagaccagctgtacgctggggaagagaccagctg

SEQ ID NO: 9055 - DNA, 133 bp, synthetic construct
  source 1..133: mol_type = other DNA
cagctggtctcttcccctacgctcagctggtctcttcccctgccgctcagctggtctcttcccctgctttcagctggtctcttcccctgatctcagctggtctcttcccctacgctcagctggtctcttcccc

SEQ ID NO: 9056 - DNA, 133 bp, synthetic construct
  source 1..133: mol_type = other DNA
ggggaagaggacagatgtacgctggggaagaggacagatgtgccgctggggaagaggacagatgtgctttggggaagaggacagatgtgatctggggaagaggacagatgtacgctggggaagaggacagatg

SEQ ID NO: 9057 - DNA, 133 bp, synthetic construct
  source 1..133: mol_type = other DNA
catctgtcctcttcccctacgctcatctgtcctcttcccctgccgctcatctgtcctcttcccctgctttcatctgtcctcttcccctgatctcatctgtcctcttcccctacgctcatctgtcctcttcccc

SEQ ID NO: 9058 - DNA, 133 bp, synthetic construct
  source 1..133: mol_type = other DNA
ggggaagaggacagctgtacgctggggaagaggacagctgtgccgctggggaagaggacagctgtgctttggggaagaggacagctgtgatctggggaagaggacagctgtacgctggggaagaggacagctg

SEQ ID NO: 9059 - DNA, 133 bp, synthetic construct
  source 1..133: mol_type = other DNA
cagctgtcctcttcccctacgctcagctgtcctcttcccctgccgctcagctgtcctcttcccctgctttcagctgtcctcttcccctgatctcagctgtcctcttcccctacgctcagctgtcctcttcccc

SEQ ID NO: 9060 - DNA, 133 bp, synthetic construct
  source 1..133: mol_type = other DNA
ggggaagaggccagatgtacgctggggaagaggccagatgtgccgctggggaagaggccagatgtgctttggggaagaggccagatgtgatctggggaagaggccagatgtacgctggggaagaggccagatg

SEQ ID NO: 9061 - DNA, 133 bp, synthetic construct
  source 1..133: mol_type = other DNA
catctggcctcttcccctacgctcatctggcctcttcccctgccgctcatctggcctcttcccctgctttcatctggcctcttcccctgatctcatctggcctcttcccctacgctcatctggcctcttcccc

SEQ ID NO: 9062 - DNA, 133 bp, synthetic construct
  source 1..133: mol_type = other DNA
ggggaagaggccagctgtacgctggggaagaggccagctgtgccgctggggaagaggccagctgtgctttggggaagaggccagctgtgatctggggaagaggccagctgtacgctggggaagaggccagctg

SEQ ID NO: 9063 - DNA, 133 bp, synthetic construct
  source 1..133: mol_type = other DNA
cagctggcctcttcccctacgctcagctggcctcttcccctgccgctcagctggcctcttcccctgctttcagctggcctcttcccctgatctcagctggcctcttcccctacgctcagctggcctcttcccc

SEQ ID NO: 9064 - DNA, 133 bp, synthetic construct
  source 1..133: mol_type = other DNA
ggggaagggaacagatgtacgctggggaagggaacagatgtgccgctggggaagggaacagatgtgctttggggaagggaacagatgtgatctggggaagggaacagatgtacgctggggaagggaacagatg

SEQ ID NO: 9065 - DNA, 133 bp, synthetic construct
  source 1..133: mol_type = other DNA
catctgttcccttcccctacgctcatctgttcccttcccctgccgctcatctgttcccttcccctgctttcatctgttcccttcccctgatctcatctgttcccttcccctacgctcatctgttcccttcccc

SEQ ID NO: 9066 - DNA, 133 bp, synthetic construct
  source 1..133: mol_type = other DNA
ggggaagggaacagctgtacgctggggaagggaacagctgtgccgctggggaagggaacagctgtgctttggggaagggaacagctgtgatctggggaagggaacagctgtacgctggggaagggaacagctg

SEQ ID NO: 9067 - DNA, 133 bp, synthetic construct
  source 1..133: mol_type = other DNA
cagctgttcccttcccctacgctcagctgttcccttcccctgccgctcagctgttcccttcccctgctttcagctgttcccttcccctgatctcagctgttcccttcccctacgctcagctgttcccttcccc

SEQ ID NO: 9068 - DNA, 133 bp, synthetic construct
  source 1..133: mol_type = other DNA
ggggaagggaccagatgtacgctggggaagggaccagatgtgccgctggggaagggaccagatgtgctttggggaagggaccagatgtgatctggggaagggaccagatgtacgctggggaagggaccagatg

SEQ ID NO: 9069 - DNA, 133 bp, synthetic construct
  source 1..133: mol_type = other DNA
catctggtcccttcccctacgctcatctggtcccttcccctgccgctcatctggtcccttcccctgctttcatctggtcccttcccctgatctcatctggtcccttcccctacgctcatctggtcccttcccc

SEQ ID NO: 9070 - DNA, 133 bp, synthetic construct
  source 1..133: mol_type = other DNA
ggggaagggaccagctgtacgctggggaagggaccagctgtgccgctggggaagggaccagctgtgctttggggaagggaccagctgtgatctggggaagggaccagctgtacgctggggaagggaccagctg

SEQ ID NO: 9071 - DNA, 133 bp, synthetic construct
  source 1..133: mol_type = other DNA
cagctggtcccttcccctacgctcagctggtcccttcccctgccgctcagctggtcccttcccctgctttcagctggtcccttcccctgatctcagctggtcccttcccctacgctcagctggtcccttcccc

SEQ ID NO: 9072 - DNA, 133 bp, synthetic construct
  source 1..133: mol_type = other DNA
ggggaaggggacagatgtacgctggggaaggggacagatgtgccgctggggaaggggacagatgtgctttggggaaggggacagatgtgatctggggaaggggacagatgtacgctggggaaggggacagatg

SEQ ID NO: 9073 - DNA, 133 bp, synthetic construct
  source 1..133: mol_type = other DNA
catctgtccccttcccctacgctcatctgtccccttcccctgccgctcatctgtccccttcccctgctttcatctgtccccttcccctgatctcatctgtccccttcccctacgctcatctgtccccttcccc

SEQ ID NO: 9074 - DNA, 133 bp, synthetic construct
  source 1..133: mol_type = other DNA
ggggaaggggacagctgtacgctggggaaggggacagctgtgccgctggggaaggggacagctgtgctttggggaaggggacagctgtgatctggggaaggggacagctgtacgctggggaaggggacagctg

SEQ ID NO: 9075 - DNA, 133 bp, synthetic construct
  source 1..133: mol_type = other DNA
cagctgtccccttcccctacgctcagctgtccccttcccctgccgctcagctgtccccttcccctgctttcagctgtccccttcccctgatctcagctgtccccttcccctacgctcagctgtccccttcccc

SEQ ID NO: 9076 - DNA, 133 bp, synthetic construct
  source 1..133: mol_type = other DNA
ggggaaggggccagatgtacgctggggaaggggccagatgtgccgctggggaaggggccagatgtgctttggggaaggggccagatgtgatctggggaaggggccagatgtacgctggggaaggggccagatg

SEQ ID NO: 9077 - DNA, 133 bp, synthetic construct
  source 1..133: mol_type = other DNA
catctggccccttcccctacgctcatctggccccttcccctgccgctcatctggccccttcccctgctttcatctggccccttcccctgatctcatctggccccttcccctacgctcatctggccccttcccc

SEQ ID NO: 9078 - DNA, 133 bp, synthetic construct
  source 1..133: mol_type = other DNA
ggggaaggggccagctgtacgctggggaaggggccagctgtgccgctggggaaggggccagctgtgctttggggaaggggccagctgtgatctggggaaggggccagctgtacgctggggaaggggccagctg

SEQ ID NO: 9079 - DNA, 133 bp, synthetic construct
  source 1..133: mol_type = other DNA
cagctggccccttcccctacgctcagctggccccttcccctgccgctcagctggccccttcccctgctttcagctggccccttcccctgatctcagctggccccttcccctacgctcagctggccccttcccc

SEQ ID NO: 9080 - DNA, 139 bp, synthetic construct
  source 1..139: mol_type = other DNA
accacgcccacctgctttaccacgcccacctgatctaccacgcccacctacgctaccacgcccacctgccgctaccacgcccacctgctttaccacgcccacctgatctaccacgcccacctacgctaccacgcccacc

SEQ ID NO: 9081 - DNA, 139 bp, synthetic construct
  source 1..139: mol_type = other DNA
ggtgggcgtggttgctttggtgggcgtggttgatctggtgggcgtggttacgctggtgggcgtggttgccgctggtgggcgtggttgctttggtgggcgtggttgatctggtgggcgtggttacgctggtgggcgtggt

SEQ ID NO: 9082 - DNA, 139 bp, synthetic construct
  source 1..139: mol_type = other DNA
accacgcccacttgctttaccacgcccacttgatctaccacgcccacttacgctaccacgcccacttgccgctaccacgcccacttgctttaccacgcccacttgatctaccacgcccacttacgctaccacgcccact

SEQ ID NO: 9083 - DNA, 139 bp, synthetic construct
  source 1..139: mol_type = other DNA
agtgggcgtggttgctttagtgggcgtggttgatctagtgggcgtggttacgctagtgggcgtggttgccgctagtgggcgtggttgctttagtgggcgtggttgatctagtgggcgtggttacgctagtgggcgtggt

SEQ ID NO: 9084 - DNA, 139 bp, synthetic construct
  source 1..139: mol_type = other DNA
accacgcccccctgctttaccacgcccccctgatctaccacgcccccctacgctaccacgcccccctgccgctaccacgcccccctgctttaccacgcccccctgatctaccacgcccccctacgctaccacgcccccc

SEQ ID NO: 9085 - DNA, 139 bp, synthetic construct
  source 1..139: mol_type = other DNA
ggggggcgtggttgctttggggggcgtggttgatctggggggcgtggttacgctggggggcgtggttgccgctggggggcgtggttgctttggggggcgtggttgatctggggggcgtggttacgctggggggcgtggt

SEQ ID NO: 9086 - DNA, 139 bp, synthetic construct
  source 1..139: mol_type = other DNA
accacgcccccttgctttaccacgcccccttgatctaccacgcccccttacgctaccacgcccccttgccgctaccacgcccccttgctttaccacgcccccttgatctaccacgcccccttacgctaccacgccccct

SEQ ID NO: 9087 - DNA, 139 bp, synthetic construct
  source 1..139: mol_type = other DNA
agggggcgtggttgctttagggggcgtggttgatctagggggcgtggttacgctagggggcgtggttgccgctagggggcgtggttgctttagggggcgtggttgatctagggggcgtggttacgctagggggcgtggt

SEQ ID NO: 9088 - DNA, 139 bp, synthetic construct; identical to SEQ ID NO: 8343
  source 1..139: mol_type = other DNA

SEQ ID NO: 9089 - DNA, 139 bp, synthetic construct; identical to SEQ ID NO: 8342
  source 1..139: mol_type = other DNA

SEQ ID NO: 9090 - DNA, 139 bp, synthetic construct; identical to SEQ ID NO: 8335
  source 1..139: mol_type = other DNA

SEQ ID NO: 9091 - DNA, 139 bp, synthetic construct; identical to SEQ ID NO: 8334
  source 1..139: mol_type = other DNA

SEQ ID NO: 9092 - DNA, 139 bp, synthetic construct; identical to SEQ ID NO: 8339
  source 1..139: mol_type = other DNA

SEQ ID NO: 9093 - DNA, 139 bp, synthetic construct; identical to SEQ ID NO: 8338
  source 1..139: mol_type = other DNA

SEQ ID NO: 9094 - DNA, 139 bp, synthetic construct; identical to SEQ ID NO: 8331
  source 1..139: mol_type = other DNA

SEQ ID NO: 9095 - DNA, 139 bp, synthetic construct; identical to SEQ ID NO: 8330
  source 1..139: mol_type = other DNA

SEQ ID NO: 9096 - DNA, 140 bp, synthetic construct
  source 1..140: mol_type = other DNA
gccatctgtttgccgctgccatctgtttgctttgccatctgtttgatctgccatctgtttacgctgccatctgtttgccgctgccatctgtttgctttgccatctgtttgatctgccatctgtttacgctgccatctgtt

SEQ ID NO: 9097 - DNA, 140 bp, synthetic construct
  source 1..140: mol_type = other DNA
aacagatggctgccgctaacagatggctgctttaacagatggctgatctaacagatggctacgctaacagatggctgccgctaacagatggctgctttaacagatggctgatctaacagatggctacgctaacagatggc

SEQ ID NO: 9098 - DNA, 139 bp, synthetic construct
  source 1..139: mol_type = other DNA
gctccgaggcttccagcctacgctgctccgaggcttccagcctgccgctgctccgaggcttccagcctgctttgctccgaggcttccagcctgatctgctccgaggcttccagcctacgctgctccgaggcttccagcc

SEQ ID NO: 9099 - DNA, 139 bp, synthetic construct
  source 1..139: mol_type = other DNA
ggctggaagcctcggagctacgctggctggaagcctcggagctgccgctggctggaagcctcggagctgctttggctggaagcctcggagctgatctggctggaagcctcggagctacgctggctggaagcctcggagc

SEQ ID NO: 9100 - DNA, 139 bp, synthetic construct
  source 1..139: mol_type = other DNA
gctccgaggcttctagcctacgctgctccgaggcttctagcctgccgctgctccgaggcttctagcctgctttgctccgaggcttctagcctgatctgctccgaggcttctagcctacgctgctccgaggcttctagcc

SEQ ID NO: 9101 - DNA, 139 bp, synthetic construct
  source 1..139: mol_type = other DNA
ggctagaagcctcggagctacgctggctagaagcctcggagctgccgctggctagaagcctcggagctgctttggctagaagcctcggagctgatctggctagaagcctcggagctacgctggctagaagcctcggagc

SEQ ID NO: 9102 - DNA, 139 bp, synthetic construct
  source 1..139: mol_type = other DNA
gctcccaggcttccagcctacgctgctcccaggcttccagcctgccgctgctcccaggcttccagcctgctttgctcccaggcttccagcctgatctgctcccaggcttccagcctacgctgctcccaggcttccagcc

SEQ ID NO: 9103 - DNA, 139 bp, synthetic construct
  source 1..139: mol_type = other DNA
ggctggaagcctgggagctacgctggctggaagcctgggagctgccgctggctggaagcctgggagctgctttggctggaagcctgggagctgatctggctggaagcctgggagctacgctggctggaagcctgggagc

SEQ ID NO: 9104 - DNA, 139 bp, synthetic construct
  source 1..139: mol_type = other DNA
gctcccaggcttctagcctacgctgctcccaggcttctagcctgccgctgctcccaggcttctagcctgctttgctcccaggcttctagcctgatctgctcccaggcttctagcctacgctgctcccaggcttctagcc

SEQ ID NO: 9105 - DNA, 139 bp, synthetic construct
  source 1..139: mol_type = other DNA
ggctagaagcctgggagctacgctggctagaagcctgggagctgccgctggctagaagcctgggagctgctttggctagaagcctgggagctgatctggctagaagcctgggagctacgctggctagaagcctgggagc

SEQ ID NO: 9106 - DNA, 140 bp, synthetic construct
  source 1..140: mol_type = other DNA
aaagaggtcatgccgctaaagaggtcatgctttaaagaggtcatgatctaaagaggtcatacgctaaagaggtcatgccgctaaagaggtcatgctttaaagaggtcatgatctaaagaggtcatacgctaaagaggtca

SEQ ID NO: 9107 - DNA, 140 bp, synthetic construct
  source 1..140: mol_type = other DNA
tgacctcttttgccgcttgacctcttttgcttttgacctcttttgatcttgacctcttttacgcttgacctcttttgccgcttgacctcttttgcttttgacctcttttgatcttgacctcttttacgcttgacctcttt

SEQ ID NO: 9108 - DNA, 140 bp, synthetic construct
  source 1..140: mol_type = other DNA
atagaggtcatgccgctatagaggtcatgctttatagaggtcatgatctatagaggtcatacgctatagaggtcatgccgctatagaggtcatgctttatagaggtcatgatctatagaggtcatacgctatagaggtca

SEQ ID NO: 9109 - DNA, 140 bp, synthetic construct
  source 1..140: mol_type = other DNA
tgacctctattgccgcttgacctctattgcttttgacctctattgatcttgacctctattacgcttgacctctattgccgcttgacctctattgcttttgacctctattgatcttgacctctattacgcttgacctctat

SEQ ID NO: 9110 - DNA, 139 bp, synthetic construct
  source 1..139: mol_type = other DNA
aggtgacagacatgctttaggtgacagacatgatctaggtgacagacatacgctaggtgacagacatgccgctaggtgacagacatgctttaggtgacagacatgatctaggtgacagacatacgctaggtgacagaca

SEQ ID NO: 9111 - DNA, 139 bp, synthetic construct
  source 1..139: mol_type = other DNA
tgtctgtcaccttgcttttgtctgtcaccttgatcttgtctgtcaccttacgcttgtctgtcaccttgccgcttgtctgtcaccttgcttttgtctgtcaccttgatcttgtctgtcaccttacgcttgtctgtcacct

SEQ ID NO: 9112 - DNA, 139 bp, synthetic construct
  source 1..139: mol_type = other DNA
aggtgccagacatgctttaggtgccagacatgatctaggtgccagacatacgctaggtgccagacatgccgctaggtgccagacatgctttaggtgccagacatgatctaggtgccagacatacgctaggtgccagaca

SEQ ID NO: 9113 - DNA, 139 bp, synthetic construct
  source 1..139: mol_type = other DNA
tgtctggcaccttgcttttgtctggcaccttgatcttgtctggcaccttacgcttgtctggcaccttgccgcttgtctggcaccttgcttttgtctggcaccttgatcttgtctggcaccttacgcttgtctggcacct

SEQ ID NO: 9114 - DNA, 139 bp, synthetic construct
  source 1..139: mol_type = other DNA
aggtgtcagacatgctttaggtgtcagacatgatctaggtgtcagacatacgctaggtgtcagacatgccgctaggtgtcagacatgctttaggtgtcagacatgatctaggtgtcagacatacgctaggtgtcagaca

SEQ ID NO: 9115 - DNA, 139 bp, synthetic construct
  source 1..139: mol_type = other DNA
tgtctgacaccttgcttttgtctgacaccttgatcttgtctgacaccttacgcttgtctgacaccttgccgcttgtctgacaccttgcttttgtctgacaccttgatcttgtctgacaccttacgcttgtctgacacct

SEQ ID NO: 9116 - DNA, 149 bp, synthetic construct
  source 1..149: mol_type = other DNA
gtgaccttgaatgccgctgtgaccttgaatgctttgtgaccttgaatgatctgtgaccttgaatacgctgtgaccttgaatgccgctgtgaccttgaatgctttgtgaccttgaatgatctgtgaccttgaatacgctgtgaccttgaa

SEQ ID NO: 9117 - DNA, 149 bp, synthetic construct
  source 1..149: mol_type = other DNA
ttcaaggtcactgccgctttcaaggtcactgctttttcaaggtcactgatctttcaaggtcactacgctttcaaggtcactgccgctttcaaggtcactgctttttcaaggtcactgatctttcaaggtcactacgctttcaaggtcac

SEQ ID NO: 9118 - DNA, 149 bp, synthetic construct
  source 1..149: mol_type = other DNA
gtgaccttgactgccgctgtgaccttgactgctttgtgaccttgactgatctgtgaccttgactacgctgtgaccttgactgccgctgtgaccttgactgctttgtgaccttgactgatctgtgaccttgactacgctgtgaccttgac

SEQ ID NO: 9119 - DNA, 149 bp, synthetic construct
  source 1..149: mol_type = other DNA
gtcaaggtcactgccgctgtcaaggtcactgctttgtcaaggtcactgatctgtcaaggtcactacgctgtcaaggtcactgccgctgtcaaggtcactgctttgtcaaggtcactgatctgtcaaggtcactacgctgtcaaggtcac

SEQ ID NO: 9120 - DNA, 149 bp, synthetic construct
  source 1..149: mol_type = other DNA
gtgaccttgagtgccgctgtgaccttgagtgctttgtgaccttgagtgatctgtgaccttgagtacgctgtgaccttgagtgccgctgtgaccttgagtgctttgtgaccttgagtgatctgtgaccttgagtacgctgtgaccttgag

SEQ ID NO: 9121 - DNA, 149 bp, synthetic construct
  source 1..149: mol_type = other DNA
ctcaaggtcactgccgctctcaaggtcactgctttctcaaggtcactgatctctcaaggtcactacgctctcaaggtcactgccgctctcaaggtcactgctttctcaaggtcactgatctctcaaggtcactacgctctcaaggtcac

SEQ ID NO: 9122 - DNA, 149 bp, synthetic construct
  source 1..149: mol_type = other DNA
gtgaccttggatgccgctgtgaccttggatgctttgtgaccttggatgatctgtgaccttggatacgctgtgaccttggatgccgctgtgaccttggatgctttgtgaccttggatgatctgtgaccttggatacgctgtgaccttgga

SEQ ID NO: 9123 - DNA, 149 bp, synthetic construct
  source 1..149: mol_type = other DNA
tccaaggtcactgccgcttccaaggtcactgcttttccaaggtcactgatcttccaaggtcactacgcttccaaggtcactgccgcttccaaggtcactgcttttccaaggtcactgatcttccaaggtcactacgcttccaaggtcac

SEQ ID NO: 9124 - DNA, 149 bp, synthetic construct
  source 1..149: mol_type = other DNA
gtgaccttggctgccgctgtgaccttggctgctttgtgaccttggctgatctgtgaccttggctacgctgtgaccttggctgccgctgtgaccttggctgctttgtgaccttggctgatctgtgaccttggctacgctgtgaccttggc

SEQ ID NO: 9125 - DNA, 149 bp, synthetic construct
  source 1..149: mol_type = other DNA
gccaaggtcactgccgctgccaaggtcactgctttgccaaggtcactgatctgccaaggtcactacgctgccaaggtcactgccgctgccaaggtcactgctttgccaaggtcactgatctgccaaggtcactacgctgccaaggtcac

SEQ ID NO: 9126 - DNA, 149 bp, synthetic construct
  source 1..149: mol_type = other DNA
gtgaccttgggtgccgctgtgaccttgggtgctttgtgaccttgggtgatctgtgaccttgggtacgctgtgaccttgggtgccgctgtgaccttgggtgctttgtgaccttgggtgatctgtgaccttgggtacgctgtgaccttggg

SEQ ID NO: 9127 - DNA, 149 bp, synthetic construct
  source 1..149: mol_type = other DNA
cccaaggtcactgccgctcccaaggtcactgctttcccaaggtcactgatctcccaaggtcactacgctcccaaggtcactgccgctcccaaggtcactgctttcccaaggtcactgatctcccaaggtcactacgctcccaaggtcac

SEQ ID NO: 9128 - DNA, 139 bp, synthetic construct
  source 1..139: mol_type = other DNA
gctgagtcagcatgctttgctgagtcagcatgatctgctgagtcagcatacgctgctgagtcagcatgccgctgctgagtcagcatgctttgctgagtcagcatgatctgctgagtcagcatacgctgctgagtcagca

SEQ ID NO: 9129 - DNA, 139 bp, synthetic construct
  source 1..139: mol_type = other DNA
tgctgactcagctgcttttgctgactcagctgatcttgctgactcagctacgcttgctgactcagctgccgcttgctgactcagctgcttttgctgactcagctgatcttgctgactcagctacgcttgctgactcagc

SEQ ID NO: 9130 - DNA, 139 bp, synthetic construct
  source 1..139: mol_type = other DNA
gctgactcagcatgctttgctgactcagcatgatctgctgactcagcatacgctgctgactcagcatgccgctgctgactcagcatgctttgctgactcagcatgatctgctgactcagcatacgctgctgactcagca

SEQ ID NO: 9131 - DNA, 139 bp, synthetic construct
  source 1..139: mol_type = other DNA
tgctgagtcagctgcttttgctgagtcagctgatcttgctgagtcagctacgcttgctgagtcagctgccgcttgctgagtcagctgcttttgctgagtcagctgatcttgctgagtcagctacgcttgctgagtcagc

SEQ ID NO: 9132 - DNA, 145 bp, synthetic construct
  source 1..145: mol_type = other DNA
tatactgcaccccctcccatgacatgccgcttatactgcaccccctcccatgacatgcttttatactgcaccccctcccatgacatgatcttatactgcaccccctcccatgacatacgcttatactgcaccccctcccatgaca

SEQ ID NO: 9133 - DNA, 145 bp, synthetic construct
  source 1..145: mol_type = other DNA
tgtcatgggagggggtgcagtatatgccgcttgtcatgggagggggtgcagtatatgcttttgtcatgggagggggtgcagtatatgatcttgtcatgggagggggtgcagtatatacgcttgtcatgggagggggtgcagtata

SEQ ID NO: 9134 - DNA, 145 bp, synthetic construct
  source 1..145: mol_type = other DNA
tatactgcaccccctcccatgacctgccgcttatactgcaccccctcccatgacctgcttttatactgcaccccctcccatgacctgatcttatactgcaccccctcccatgacctacgcttatactgcaccccctcccatgacc

SEQ ID NO: 9135 - DNA, 145 bp, synthetic construct
  source 1..145: mol_type = other DNA
ggtcatgggagggggtgcagtatatgccgctggtcatgggagggggtgcagtatatgctttggtcatgggagggggtgcagtatatgatctggtcatgggagggggtgcagtatatacgctggtcatgggagggggtgcagtata

SEQ ID NO: 9136 - DNA, 145 bp, synthetic construct
  source 1..145: mol_type = other DNA
tatactgcaccccctcccatgtcatgccgcttatactgcaccccctcccatgtcatgcttttatactgcaccccctcccatgtcatgatcttatactgcaccccctcccatgtcatacgcttatactgcaccccctcccatgtca

SEQ ID NO: 9137 - DNA, 145 bp, synthetic construct
  source 1..145: mol_type = other DNA
tgacatgggagggggtgcagtatatgccgcttgacatgggagggggtgcagtatatgcttttgacatgggagggggtgcagtatatgatcttgacatgggagggggtgcagtatatacgcttgacatgggagggggtgcagtata

SEQ ID NO: 9138 - DNA, 145 bp, synthetic construct
  source 1..145: mol_type = other DNA
tatactgcaccccctcccatgtcctgccgcttatactgcaccccctcccatgtcctgcttttatactgcaccccctcccatgtcctgatcttatactgcaccccctcccatgtcctacgcttatactgcaccccctcccatgtcc

SEQ ID NO: 9139 - DNA, 145 bp, synthetic construct
  source 1..145: mol_type = other DNA
ggacatgggagggggtgcagtatatgccgctggacatgggagggggtgcagtatatgctttggacatgggagggggtgcagtatatgatctggacatgggagggggtgcagtatatacgctggacatgggagggggtgcagtata

SEQ ID NO: 9140 - DNA, 145 bp, synthetic construct
  source 1..145: mol_type = other DNA
tatactgcaccccttcccatgacatgccgcttatactgcaccccttcccatgacatgcttttatactgcaccccttcccatgacatgatcttatactgcaccccttcccatgacatacgcttatactgcaccccttcccatgaca

SEQ ID NO: 9141 - DNA, 145 bp, synthetic construct
  source 1..145: mol_type = other DNA
tgtcatgggaaggggtgcagtatatgccgcttgtcatgggaaggggtgcagtatatgcttttgtcatgggaaggggtgcagtatatgatcttgtcatgggaaggggtgcagtatatacgcttgtcatgggaaggggtgcagtata

SEQ ID NO: 9142 - DNA, 145 bp, synthetic construct
  source 1..145: mol_type = other DNA
tatactgcaccccttcccatgacctgccgcttatactgcaccccttcccatgacctgcttttatactgcaccccttcccatgacctgatcttatactgcaccccttcccatgacctacgcttatactgcaccccttcccatgacc

SEQ ID NO: 9143 - DNA, 145 bp, synthetic construct
  source 1..145: mol_type = other DNA
ggtcatgggaaggggtgcagtatatgccgctggtcatgggaaggggtgcagtatatgctttggtcatgggaaggggtgcagtatatgatctggtcatgggaaggggtgcagtatatacgctggtcatgggaaggggtgcagtata

SEQ ID NO: 9144 - DNA, 145 bp, synthetic construct
  source 1..145: mol_type = other DNA
tatactgcaccccttcccatgtcatgccgcttatactgcaccccttcccatgtcatgcttttatactgcaccccttcccatgtcatgatcttatactgcaccccttcccatgtcatacgcttatactgcaccccttcccatgtca

SEQ ID NO: 9145 - DNA, 145 bp, synthetic construct
  source 1..145: mol_type = other DNA
tgacatgggaaggggtgcagtatatgccgcttgacatgggaaggggtgcagtatatgcttttgacatgggaaggggtgcagtatatgatcttgacatgggaaggggtgcagtatatacgcttgacatgggaaggggtgcagtata

SEQ ID NO: 9146 - DNA, 145 bp, synthetic construct
  source 1..145: mol_type = other DNA
tatactgcaccccttcccatgtcctgccgcttatactgcaccccttcccatgtcctgcttttatactgcaccccttcccatgtcctgatcttatactgcaccccttcccatgtcctacgcttatactgcaccccttcccatgtcc

SEQ ID NO: 9147 - DNA, 145 bp, synthetic construct
  source 1..145: mol_type = other DNA
ggacatgggaaggggtgcagtatatgccgctggacatgggaaggggtgcagtatatgctttggacatgggaaggggtgcagtatatgatctggacatgggaaggggtgcagtatatacgctggacatgggaaggggtgcagtata

SEQ ID NO: 9148 - DNA, 145 bp, synthetic construct
  source 1..145: mol_type = other DNA
tatactgctccccctcccatgacatgccgcttatactgctccccctcccatgacatgcttttatactgctccccctcccatgacatgatcttatactgctccccctcccatgacatacgcttatactgctccccctcccatgaca

SEQ ID NO: 9149 - DNA, 145 bp, synthetic construct
  source 1..145: mol_type = other DNA
tgtcatgggagggggagcagtatatgccgcttgtcatgggagggggagcagtatatgcttttgtcatgggagggggagcagtatatgatcttgtcatgggagggggagcagtatatacgcttgtcatgggagggggagcagtata

SEQ ID NO: 9150 - DNA, 145 bp, synthetic construct
  source 1..145: mol_type = other DNA
tatactgctccccctcccatgacctgccgcttatactgctccccctcccatgacctgcttttatactgctccccctcccatgacctgatcttatactgctccccctcccatgacctacgcttatactgctccccctcccatgacc

SEQ ID NO: 9151 - DNA, 145 bp, synthetic construct
  source 1..145: mol_type = other DNA
ggtcatgggagggggagcagtatatgccgctggtcatgggagggggagcagtatatgctttggtcatgggagggggagcagtatatgatctggtcatgggagggggagcagtatatacgctggtcatgggagggggagcagtata

SEQ ID NO: 9152 - DNA, 145 bp, synthetic construct
  source 1..145: mol_type = other DNA
tatactgctccccctcccatgtcatgccgcttatactgctccccctcccatgtcatgcttttatactgctccccctcccatgtcatgatcttatactgctccccctcccatgtcatacgcttatactgctccccctcccatgtca

SEQ ID NO: 9153 - DNA, 145 bp, synthetic construct
  source 1..145: mol_type = other DNA
tgacatgggagggggagcagtatatgccgcttgacatgggagggggagcagtatatgcttttgacatgggagggggagcagtatatgatcttgacatgggagggggagcagtatatacgcttgacatgggagggggagcagtata

SEQ ID NO: 9154 - DNA, 145 bp, synthetic construct
  source 1..145: mol_type = other DNA
tatactgctccccctcccatgtcctgccgcttatactgctccccctcccatgtcctgcttttatactgctccccctcccatgtcctgatcttatactgctccccctcccatgtcctacgcttatactgctccccctcccatgtcc

SEQ ID NO: 9155 - DNA, 145 bp, synthetic construct
  source 1..145: mol_type = other DNA
ggacatgggagggggagcagtatatgccgctggacatgggagggggagcagtatatgctttggacatgggagggggagcagtatatgatctggacatgggagggggagcagtatatacgctggacatgggagggggagcagtata

SEQ ID NO: 9156 - DNA, 145 bp, synthetic construct
  source 1..145: mol_type = other DNA
tatactgctccccttcccatgacatgccgcttatactgctccccttcccatgacatgcttttatactgctccccttcccatgacatgatcttatactgctccccttcccatgacatacgcttatactgctccccttcccatgaca

SEQ ID NO: 9157 - DNA, 145 bp, synthetic construct
  source 1..145: mol_type = other DNA
tgtcatgggaaggggagcagtatatgccgcttgtcatgggaaggggagcagtatatgcttttgtcatgggaaggggagcagtatatgatcttgtcatgggaaggggagcagtatatacgcttgtcatgggaaggggagcagtata

SEQ ID NO: 9158 - DNA, 145 bp, synthetic construct
  source 1..145: mol_type = other DNA
tatactgctccccttcccatgacctgccgcttatactgctccccttcccatgacctgcttttatactgctccccttcccatgacctgatcttatactgctccccttcccatgacctacgcttatactgctccccttcccatgacc

SEQ ID NO: 9159 - DNA, 145 bp, synthetic construct
  source 1..145: mol_type = other DNA
ggtcatgggaaggggagcagtatatgccgctggtcatgggaaggggagcagtatatgctttggtcatgggaaggggagcagtatatgatctggtcatgggaaggggagcagtatatacgctggtcatgggaaggggagcagtata

SEQ ID NO: 9160 - DNA, 145 bp, synthetic construct
  source 1..145: mol_type = other DNA
tatactgctccccttcccatgtcatgccgcttatactgctccccttcccatgtcatgcttttatactgctccccttcccatgtcatgatcttatactgctccccttcccatgtcatacgcttatactgctccccttcccatgtca

SEQ ID NO: 9161 - DNA, 145 bp, synthetic construct
  source 1..145: mol_type = other DNA
tgacatgggaaggggagcagtatatgccgcttgacatgggaaggggagcagtatatgcttttgacatgggaaggggagcagtatatgatcttgacatgggaaggggagcagtatatacgcttgacatgggaaggggagcagtata

SEQ ID NO: 9162 - DNA, 145 bp, synthetic construct
  source 1..145: mol_type = other DNA
tatactgctccccttcccatgtcctgccgcttatactgctccccttcccatgtcctgcttttatactgctccccttcccatgtcctgatcttatactgctccccttcccatgtcctacgcttatactgctccccttcccatgtcc

SEQ ID NO: 9163 - DNA, 145 bp, synthetic construct
  source 1..145: mol_type = other DNA
ggacatgggaaggggagcagtatatgccgctggacatgggaaggggagcagtatatgctttggacatgggaaggggagcagtatatgatctggacatgggaaggggagcagtatatacgctggacatgggaaggggagcagtata

SEQ ID NO: 9164 - DNA, 145 bp, synthetic construct
  source 1..145: mol_type = other DNA
tatattgcaccccctcccatgacatgccgcttatattgcaccccctcccatgacatgcttttatattgcaccccctcccatgacatgatcttatattgcaccccctcccatgacatacgcttatattgcaccccctcccatgaca

SEQ ID NO: 9165 - DNA, 145 bp, synthetic construct
  source 1..145: mol_type = other DNA
tgtcatgggagggggtgcaatatatgccgcttgtcatgggagggggtgcaatatatgcttttgtcatgggagggggtgcaatatatgatcttgtcatgggagggggtgcaatatatacgcttgtcatgggagggggtgcaatata

SEQ ID NO: 9166 - DNA, 145 bp, synthetic construct
  source 1..145: mol_type = other DNA
tatattgcaccccctcccatgacctgccgcttatattgcaccccctcccatgacctgcttttatattgcaccccctcccatgacctgatcttatattgcaccccctcccatgacctacgcttatattgcaccccctcccatgacc

SEQ ID NO: 9167 - DNA, 145 bp, synthetic construct
  source 1..145: mol_type = other DNA
ggtcatgggagggggtgcaatatatgccgctggtcatgggagggggtgcaatatatgctttggtcatgggagggggtgcaatatatgatctggtcatgggagggggtgcaatatatacgctggtcatgggagggggtgcaatata

SEQ ID NO: 9168 - DNA, 145 bp, synthetic construct
  source 1..145: mol_type = other DNA
tatattgcaccccctcccatgtcatgccgcttatattgcaccccctcccatgtcatgcttttatattgcaccccctcccatgtcatgatcttatattgcaccccctcccatgtcatacgcttatattgcaccccctcccatgtca

SEQ ID NO: 9169 - DNA, 145 bp, synthetic construct
  source 1..145: mol_type = other DNA
tgacatgggagggggtgcaatatatgccgcttgacatgggagggggtgcaatatatgcttttgacatgggagggggtgcaatatatgatcttgacatgggagggggtgcaatatatacgcttgacatgggagggggtgcaatata

SEQ ID NO: 9170 - DNA, 145 bp, synthetic construct
  source 1..145: mol_type = other DNA
tatattgcaccccctcccatgtcctgccgcttatattgcaccccctcccatgtcctgcttttatattgcaccccctcccatgtcctgatcttatattgcaccccctcccatgtcctacgcttatattgcaccccctcccatgtcc

SEQ ID NO: 9171 - DNA, 145 bp, synthetic construct
  source 1..145: mol_type = other DNA
ggacatgggagggggtgcaatatatgccgctggacatgggagggggtgcaatatatgctttggacatgggagggggtgcaatatatgatctggacatgggagggggtgcaatatatacgctggacatgggagggggtgcaatata

SEQ ID NO: 9172 - DNA, 145 bp, synthetic construct
  source 1..145: mol_type = other DNA
tatattgcaccccttcccatgacatgccgcttatattgcaccccttcccatgacatgcttttatattgcaccccttcccatgacatgatcttatattgcaccccttcccatgacatacgcttatattgcaccccttcccatgaca

SEQ ID NO: 9173 - DNA, 145 bp, synthetic construct
  source 1..145: mol_type = other DNA
tgtcatgggaaggggtgcaatatatgccgcttgtcatgggaaggggtgcaatatatgcttttgtcatgggaaggggtgcaatatatgatcttgtcatgggaaggggtgcaatatatacgcttgtcatgggaaggggtgcaatata

SEQ ID NO: 9174 - DNA, 145 bp, synthetic construct
  source 1..145: mol_type = other DNA
tatattgcaccccttcccatgacctgccgcttatattgcaccccttcccatgacctgcttttatattgcaccccttcccatgacctgatcttatattgcaccccttcccatgacctacgcttatattgcaccccttcccatgacc

SEQ ID NO: 9175 - DNA, 145 bp, synthetic construct
  source 1..145: mol_type = other DNA
ggtcatgggaaggggtgcaatatatgccgctggtcatgggaaggggtgcaatatatgctttggtcatgggaaggggtgcaatatatgatctggtcatgggaaggggtgcaatatatacgctggtcatgggaaggggtgcaatata

SEQ ID NO: 9176 - DNA, 145 bp, synthetic construct
  source 1..145: mol_type = other DNA
tatattgcaccccttcccatgtcatgccgcttatattgcaccccttcccatgtcatgcttttatattgcaccccttcccatgtcatgatcttatattgcaccccttcccatgtcatacgcttatattgcaccccttcccatgtca

SEQ ID NO: 9177 - DNA, 145 bp, synthetic construct
  source 1..145: mol_type = other DNA
tgacatgggaaggggtgcaatatatgccgcttgacatgggaaggggtgcaatatatgcttttgacatgggaaggggtgcaatatatgatcttgacatgggaaggggtgcaatatatacgcttgacatgggaaggggtgcaatata

SEQ ID NO: 9178 - DNA, 145 bp, synthetic construct
  source 1..145: mol_type = other DNA
tatattgcaccccttcccatgtcctgccgcttatattgcaccccttcccatgtcctgcttttatattgcaccccttcccatgtcctgatcttatattgcaccccttcccatgtcctacgcttatattgcaccccttcccatgtcc

SEQ ID NO: 9179 - DNA, 145 bp, synthetic construct
  source 1..145: mol_type = other DNA
ggacatgggaaggggtgcaatatatgccgctggacatgggaaggggtgcaatatatgctttggacatgggaaggggtgcaatatatgatctggacatgggaaggggtgcaatatatacgctggacatgggaaggggtgcaatata

SEQ ID NO: 9180 - DNA, 145 bp, synthetic construct
  source 1..145: mol_type = other DNA
tatattgctccccctcccatgacatgccgcttatattgctccccctcccatgacatgcttttatattgctccccctcccatgacatgatcttatattgctccccctcccatgacatacgcttatattgctccccctcccatgaca

SEQ ID NO: 9181 - DNA, 145 bp, synthetic construct
  source 1..145: mol_type = other DNA
tgtcatgggagggggagcaatatatgccgcttgtcatgggagggggagcaatatatgcttttgtcatgggagggggagcaatatatgatcttgtcatgggagggggagcaatatatacgcttgtcatgggagggggagcaatata

SEQ ID NO: 9182 - DNA, 145 bp, synthetic construct
  source 1..145: mol_type = other DNA
tatattgctccccctcccatgacctgccgcttatattgctccccctcccatgacctgcttttatattgctccccctcccatgacctgatcttatattgctccccctcccatgacctacgcttatattgctccccctcccatgacc

SEQ ID NO: 9183 - DNA, 145 bp, synthetic construct
  source 1..145: mol_type = other DNA
ggtcatgggagggggagcaatatatgccgctggtcatgggagggggagcaatatatgctttggtcatgggagggggagcaatatatgatctggtcatgggagggggagcaatatatacgctggtcatgggagggggagcaatata

SEQ ID NO: 9184 - DNA, 145 bp, synthetic construct
  source 1..145: mol_type = other DNA
tatattgctccccctcccatgtcatgccgcttatattgctccccctcccatgtcatgcttttatattgctccccctcccatgtcatgatcttatattgctccccctcccatgtcatacgcttatattgctccccctcccatgtca

SEQ ID NO: 9185 - DNA, 145 bp, synthetic construct
  source 1..145: mol_type = other DNA
tgacatgggagggggagcaatatatgccgcttgacatgggagggggagcaatatatgcttttgacatgggagggggagcaatatatgatcttgacatgggagggggagcaatatatacgcttgacatgggagggggagcaatata

SEQ ID NO: 9186 - DNA, 145 bp, synthetic construct
  source 1..145: mol_type = other DNA
tatattgctccccctcccatgtcctgccgcttatattgctccccctcccatgtcctgcttttatattgctccccctcccatgtcctgatcttatattgctccccctcccatgtcctacgcttatattgctccccctcccatgtcc

SEQ ID NO: 9187 - DNA, 145 bp, synthetic construct
  source 1..145: mol_type = other DNA
ggacatgggagggggagcaatatatgccgctggacatgggagggggagcaatatatgctttggacatgggagggggagcaatatatgatctggacatgggagggggagcaatatatacgctggacatgggagggggagcaatata

SEQ ID NO: 9188 - DNA, 145 bp, synthetic construct
  source 1..145: mol_type = other DNA
tatattgctccccttcccatgacatgccgcttatattgctccccttcccatgacatgcttttatattgctccccttcccatgacatgatcttatattgctccccttcccatgacatacgcttatattgctccccttcccatgaca

SEQ ID NO: 9189 - DNA, 145 bp, synthetic construct
  source 1..145: mol_type = other DNA
tgtcatgggaaggggagcaatatatgccgcttgtcatgggaaggggagcaatatatgcttttgtcatgggaaggggagcaatatatgatcttgtcatgggaaggggagcaatatatacgcttgtcatgggaaggggagcaatata

SEQ ID NO: 9190 - DNA, 145 bp, synthetic construct
  source 1..145: mol_type = other DNA
tatattgctccccttcccatgacctgccgcttatattgctccccttcccatgacctgcttttatattgctccccttcccatgacctgatcttatattgctccccttcccatgacctacgcttatattgctccccttcccatgacc

SEQ ID NO: 9191 - DNA, 145 bp, synthetic construct
  source 1..145: mol_type = other DNA
ggtcatgggaaggggagcaatatatgccgctggtcatgggaaggggagcaatatatgctttggtcatgggaaggggagcaatatatgatctggtcatgggaaggggagcaatatatacgctggtcatgggaaggggagcaatata

SEQ ID NO: 9192 - DNA, 145 bp, synthetic construct
  source 1..145: mol_type = other DNA
tatattgctccccttcccatgtcatgccgcttatattgctccccttcccatgtcatgcttttatattgctccccttcccatgtcatgatcttatattgctccccttcccatgtcatacgcttatattgctccccttcccatgtca

SEQ ID NO: 9193 - DNA, 145 bp, synthetic construct
  source 1..145: mol_type = other DNA
tgacatgggaaggggagcaatatatgccgcttgacatgggaaggggagcaatatatgcttttgacatgggaaggggagcaatatatgatcttgacatgggaaggggagcaatatatacgcttgacatgggaaggggagcaatata

SEQ ID NO: 9194 - DNA, 145 bp, synthetic construct
  source 1..145: mol_type = other DNA
tatattgctccccttcccatgtcctgccgcttatattgctccccttcccatgtcctgcttttatattgctccccttcccatgtcctgatcttatattgctccccttcccatgtcctacgcttatattgctccccttcccatgtcc

SEQ ID NO: 9195 - DNA, 145 bp, synthetic construct
  source 1..145: mol_type = other DNA
ggacatgggaaggggagcaatatatgccgctggacatgggaaggggagcaatatatgctttggacatgggaaggggagcaatatatgatctggacatgggaaggggagcaatatatacgctggacatgggaaggggagcaatata

SEQ ID NO: 9196 - DNA, 145 bp, synthetic construct
  source 1..145: mol_type = other DNA
tgtactgcaccccctcccatgacatgccgcttgtactgcaccccctcccatgacatgcttttgtactgcaccccctcccatgacatgatcttgtactgcaccccctcccatgacatacgcttgtactgcaccccctcccatgaca

SEQ ID NO: 9197 - DNA, 145 bp, synthetic construct
  source 1..145: mol_type = other DNA
tgtcatgggagggggtgcagtacatgccgcttgtcatgggagggggtgcagtacatgcttttgtcatgggagggggtgcagtacatgatcttgtcatgggagggggtgcagtacatacgcttgtcatgggagggggtgcagtaca

SEQ ID NO: 9198 - DNA, 145 bp, synthetic construct
  source 1..145: mol_type = other DNA
tgtactgcaccccctcccatgacctgccgcttgtactgcaccccctcccatgacctgcttttgtactgcaccccctcccatgacctgatcttgtactgcaccccctcccatgacctacgcttgtactgcaccccctcccatgacc

SEQ ID NO: 9199 - DNA, 145 bp, synthetic construct
  source 1..145: mol_type = other DNA
ggtcatgggagggggtgcagtacatgccgctggtcatgggagggggtgcagtacatgctttggtcatgggagggggtgcagtacatgatctggtcatgggagggggtgcagtacatacgctggtcatgggagggggtgcagtaca

SEQ ID NO: 9200 - DNA, 145 bp, synthetic construct
  source 1..145: mol_type = other DNA
tgtactgcaccccctcccatgtcatgccgcttgtactgcaccccctcccatgtcatgcttttgtactgcaccccctcccatgtcatgatcttgtactgcaccccctcccatgtcatacgcttgtactgcaccccctcccatgtca

SEQ ID NO: 9201 - DNA, 145 bp, synthetic construct
  source 1..145: mol_type = other DNA
tgacatgggagggggtgcagtacatgccgcttgacatgggagggggtgcagtacatgcttttgacatgggagggggtgcagtacatgatcttgacatgggagggggtgcagtacatacgcttgacatgggagggggtgcagtaca

SEQ ID NO: 9202 - DNA, 145 bp, synthetic construct
  source 1..145: mol_type = other DNA
tgtactgcaccccctcccatgtcctgccgcttgtactgcaccccctcccatgtcctgcttttgtactgcaccccctcccatgtcctgatcttgtactgcaccccctcccatgtcctacgcttgtactgcaccccctcccatgtcc

SEQ ID NO: 9203 - DNA, 145 bp, synthetic construct
  source 1..145: mol_type = other DNA
ggacatgggagggggtgcagtacatgccgctggacatgggagggggtgcagtacatgctttggacatgggagggggtgcagtacatgatctggacatgggagggggtgcagtacatacgctggacatgggagggggtgcagtaca

SEQ ID NO: 9204 - DNA, 145 bp, synthetic construct
  source 1..145: mol_type = other DNA
tgtactgcaccccttcccatgacatgccgcttgtactgcaccccttcccatgacatgcttttgtactgcaccccttcccatgacatgatcttgtactgcaccccttcccatgacatacgcttgtactgcaccccttcccatgaca

SEQ ID NO: 9205 - DNA, 145 bp, synthetic construct
  source 1..145: mol_type = other DNA
tgtcatgggaaggggtgcagtacatgccgcttgtcatgggaaggggtgcagtacatgcttttgtcatgggaaggggtgcagtacatgatcttgtcatgggaaggggtgcagtacatacgcttgtcatgggaaggggtgcagtaca

SEQ ID NO: 9206 - DNA, 145 bp, synthetic construct
  source 1..145: mol_type = other DNA
tgtactgcaccccttcccatgacctgccgcttgtactgcaccccttcccatgacctgcttttgtactgcaccccttcccatgacctgatcttgtactgcaccccttcccatgacctacgcttgtactgcaccccttcccatgacc

SEQ ID NO: 9207 - DNA, 145 bp, synthetic construct
  source 1..145: mol_type = other DNA
ggtcatgggaaggggtgcagtacatgccgctggtcatgggaaggggtgcagtacatgctttggtcatgggaaggggtgcagtacatgatctggtcatgggaaggggtgcagtacatacgctggtcatgggaaggggtgcagtaca

SEQ ID NO: 9208 - DNA, 145 bp, synthetic construct
  source 1..145: mol_type = other DNA
tgtactgcaccccttcccatgtcatgccgcttgtactgcaccccttcccatgtcatgcttttgtactgcaccccttcccatgtcatgatcttgtactgcaccccttcccatgtcatacgcttgtactgcaccccttcccatgtca

SEQ ID NO: 9209 - DNA, 145 bp, synthetic construct
  source 1..145: mol_type = other DNA
tgacatgggaaggggtgcagtacatgccgcttgacatgggaaggggtgcagtacatgcttttgacatgggaaggggtgcagtacatgatcttgacatgggaaggggtgcagtacatacgcttgacatgggaaggggtgcagtaca

SEQ ID NO: 9210 - DNA, 145 bp, synthetic construct
  source 1..145: mol_type = other DNA
tgtactgcaccccttcccatgtcctgccgcttgtactgcaccccttcccatgtcctgcttttgtactgcaccccttcccatgtcctgatcttgtactgcaccccttcccatgtcctacgcttgtactgcaccccttcccatgtcc

SEQ ID NO: 9211 - DNA, 145 bp, synthetic construct
  source 1..145: mol_type = other DNA
ggacatgggaaggggtgcagtacatgccgctggacatgggaaggggtgcagtacatgctttggacatgggaaggggtgcagtacatgatctggacatgggaaggggtgcagtacatacgctggacatgggaaggggtgcagtaca

SEQ ID NO: 9212 - DNA, 145 bp, synthetic construct
  source 1..145: mol_type = other DNA
tgtactgctccccctcccatgacatgccgcttgtactgctccccctcccatgacatgcttttgtactgctccccctcccatgacatgatcttgtactgctccccctcccatgacatacgcttgtactgctccccctcccatgaca

SEQ ID NO: 9213 - DNA, 145 bp, synthetic construct
  source 1..145: mol_type = other DNA
tgtcatgggagggggagcagtacatgccgcttgtcatgggagggggagcagtacatgcttttgtcatgggagggggagcagtacatgatcttgtcatgggagggggagcagtacatacgcttgtcatgggagggggagcagtaca

SEQ ID NO: 9214 - DNA, 145 bp, synthetic construct
  source 1..145: mol_type = other DNA
tgtactgctccccctcccatgacctgccgcttgtactgctccccctcccatgacctgcttttgtactgctccccctcccatgacctgatcttgtactgctccccctcccatgacctacgcttgtactgctccccctcccatgacc

SEQ ID NO: 9215 - DNA, 145 bp, synthetic construct
  source 1..145: mol_type = other DNA
ggtcatgggagggggagcagtacatgccgctggtcatgggagggggagcagtacatgctttggtcatgggagggggagcagtacatgatctggtcatgggagggggagcagtacatacgctggtcatgggagggggagcagtaca

SEQ ID NO: 9216 - DNA, 145 bp, synthetic construct
  source 1..145: mol_type = other DNA
tgtactgctccccctcccatgtcatgccgcttgtactgctccccctcccatgtcatgcttttgtactgctccccctcccatgtcatgatcttgtactgctccccctcccatgtcatacgcttgtactgctccccctcccatgtca

SEQ ID NO: 9217 - DNA, 145 bp, synthetic construct
  source 1..145: mol_type = other DNA
tgacatgggagggggagcagtacatgccgcttgacatgggagggggagcagtacatgcttttgacatgggagggggagcagtacatgatcttgacatgggagggggagcagtacatacgcttgacatgggagggggagcagtaca

SEQ ID NO: 9218 - DNA, 145 bp, synthetic construct
  source 1..145: mol_type = other DNA
tgtactgctccccctcccatgtcctgccgcttgtactgctccccctcccatgtcctgcttttgtactgctccccctcccatgtcctgatcttgtactgctccccctcccatgtcctacgcttgtactgctccccctcccatgtcc

SEQ ID NO: 9219 - DNA, 145 bp, synthetic construct
  source 1..145: mol_type = other DNA
ggacatgggagggggagcagtacatgccgctggacatgggagggggagcagtacatgctttggacatgggagggggagcagtacatgatctggacatgggagggggagcagtacatacgctggacatgggagggggagcagtaca

SEQ ID NO: 9220 - DNA, 145 bp, synthetic construct
  source 1..145: mol_type = other DNA
tgtactgctccccttcccatgacatgccgcttgtactgctccccttcccatgacatgcttttgtactgctccccttcccatgacatgatcttgtactgctccccttcccatgacatacgcttgtactgctccccttcccatgaca

SEQ ID NO: 9221 - DNA, 145 bp, synthetic construct
  source 1..145: mol_type = other DNA
tgtcatgggaaggggagcagtacatgccgcttgtcatgggaaggggagcagtacatgcttttgtcatgggaaggggagcagtacatgatcttgtcatgggaaggggagcagtacatacgcttgtcatgggaaggggagcagtaca

SEQ ID NO: 9222 - DNA, 145 bp, synthetic construct
  source 1..145: mol_type = other DNA
tgtactgctccccttcccatgacctgccgcttgtactgctccccttcccatgacctgcttttgtactgctccccttcccatgacctgatcttgtactgctccccttcccatgacctacgcttgtactgctccccttcccatgacc

SEQ ID NO: 9223 - DNA, 145 bp, synthetic construct
  source 1..145: mol_type = other DNA
ggtcatgggaaggggagcagtacatgccgctggtcatgggaaggggagcagtacatgctttggtcatgggaaggggagcagtacatgatctggtcatgggaaggggagcagtacatacgctggtcatgggaaggggagcagtaca

SEQ ID NO: 9224 - DNA, 145 bp, synthetic construct
  source 1..145: mol_type = other DNA
tgtactgctccccttcccatgtcatgccgcttgtactgctccccttcccatgtcatgcttttgtactgctccccttcccatgtcatgatcttgtactgctccccttcccatgtcatacgcttgtactgctccccttcccatgtca

SEQ ID NO: 9225 - DNA, 145 bp, synthetic construct
  source 1..145: mol_type = other DNA
tgacatgggaaggggagcagtacatgccgcttgacatgggaaggggagcagtacatgcttttgacatgggaaggggagcagtacatgatcttgacatgggaaggggagcagtacatacgcttgacatgggaaggggagcagtaca

SEQ ID NO: 9226 - DNA, 145 bp, synthetic construct
  source 1..145: mol_type = other DNA
tgtactgctccccttcccatgtcctgccgcttgtactgctccccttcccatgtcctgcttttgtactgctccccttcccatgtcctgatcttgtactgctccccttcccatgtcctacgcttgtactgctccccttcccatgtcc

SEQ ID NO: 9227 - DNA, 145 bp, synthetic construct
  source 1..145: mol_type = other DNA
ggacatgggaaggggagcagtacatgccgctggacatgggaaggggagcagtacatgctttggacatgggaaggggagcagtacatgatctggacatgggaaggggagcagtacatacgctggacatgggaaggggagcagtaca

SEQ ID NO: 9228 - DNA, 145 bp, synthetic construct
  source 1..145: mol_type = other DNA
tgtattgcaccccctcccatgacatgccgcttgtattgcaccccctcccatgacatgcttttgtattgcaccccctcccatgacatgatcttgtattgcaccccctcccatgacatacgcttgtattgcaccccctcccatgaca

SEQ ID NO: 9229 - DNA, 145 bp, synthetic construct
  source 1..145: mol_type = other DNA
tgtcatgggagggggtgcaatacatgccgcttgtcatgggagggggtgcaatacatgcttttgtcatgggagggggtgcaatacatgatcttgtcatgggagggggtgcaatacatacgcttgtcatgggagggggtgcaataca

SEQ ID NO: 9230 - DNA, 145 bp, synthetic construct
  source 1..145: mol_type = other DNA
tgtattgcaccccctcccatgacctgccgcttgtattgcaccccctcccatgacctgcttttgtattgcaccccctcccatgacctgatcttgtattgcaccccctcccatgacctacgcttgtattgcaccccctcccatgacc

SEQ ID NO: 9231 - DNA, 145 bp, synthetic construct
  source 1..145: mol_type = other DNA
ggtcatgggagggggtgcaatacatgccgctggtcatgggagggggtgcaatacatgctttggtcatgggagggggtgcaatacatgatctggtcatgggagggggtgcaatacatacgctggtcatgggagggggtgcaataca

SEQ ID NO: 9232 - DNA, 145 bp, synthetic construct
  source 1..145: mol_type = other DNA
tgtattgcaccccctcccatgtcatgccgcttgtattgcaccccctcccatgtcatgcttttgtattgcaccccctcccatgtcatgatcttgtattgcaccccctcccatgtcatacgcttgtattgcaccccctcccatgtca

SEQ ID NO: 9233 - DNA, 145 bp, synthetic construct
  source 1..145: mol_type = other DNA
tgacatgggagggggtgcaatacatgccgcttgacatgggagggggtgcaatacatgcttttgacatgggagggggtgcaatacatgatcttgacatgggagggggtgcaatacatacgcttgacatgggagggggtgcaataca

SEQ ID NO: 9234 - DNA, 145 bp, synthetic construct
  source 1..145: mol_type = other DNA
tgtattgcaccccctcccatgtcctgccgcttgtattgcaccccctcccatgtcctgcttttgtattgcaccccctcccatgtcctgatcttgtattgcaccccctcccatgtcctacgcttgtattgcaccccctcccatgtcc

SEQ ID NO: 9235 - DNA, 145 bp, synthetic construct
  source 1..145: mol_type = other DNA
ggacatgggagggggtgcaatacatgccgctggacatgggagggggtgcaatacatgctttggacatgggagggggtgcaatacatgatctggacatgggagggggtgcaatacatacgctggacatgggagggggtgcaataca

SEQ ID NO: 9236 - DNA, 145 bp, synthetic construct
  source 1..145: mol_type = other DNA
tgtattgcaccccttcccatgacatgccgcttgtattgcaccccttcccatgacatgcttttgtattgcaccccttcccatgacatgatcttgtattgcaccccttcccatgacatacgcttgtattgcaccccttcccatgaca

SEQ ID NO: 9237 - DNA, 145 bp, synthetic construct
  source 1..145: mol_type = other DNA
tgtcatgggaaggggtgcaatacatgccgcttgtcatgggaaggggtgcaatacatgcttttgtcatgggaaggggtgcaatacatgatcttgtcatgggaaggggtgcaatacatacgcttgtcatgggaaggggtgcaataca

SEQ ID NO: 9238 - DNA, 145 bp, synthetic construct
  source 1..145: mol_type = other DNA
tgtattgcaccccttcccatgacctgccgcttgtattgcaccccttcccatgacctgcttttgtattgcaccccttcccatgacctgatcttgtattgcaccccttcccatgacctacgcttgtattgcaccccttcccatgacc

SEQ ID NO: 9239 - DNA, 145 bp, synthetic construct
  source 1..145: mol_type = other DNA
ggtcatgggaaggggtgcaatacatgccgctggtcatgggaaggggtgcaatacatgctttggtcatgggaaggggtgcaatacatgatctggtcatgggaaggggtgcaatacatacgctggtcatgggaaggggtgcaataca

SEQ ID NO: 9240 - DNA, 145 bp, synthetic construct
  source 1..145: mol_type = other DNA
tgtattgcaccccttcccatgtcatgccgcttgtattgcaccccttcccatgtcatgcttttgtattgcaccccttcccatgtcatgatcttgtattgcaccccttcccatgtcatacgcttgtattgcaccccttcccatgtca

SEQ ID NO: 9241 - DNA, 145 bp, synthetic construct
  source 1..145: mol_type = other DNA
tgacatgggaaggggtgcaatacatgccgcttgacatgggaaggggtgcaatacatgcttttgacatgggaaggggtgcaatacatgatcttgacatgggaaggggtgcaatacatacgcttgacatgggaaggggtgcaataca

SEQ ID NO: 9242 - DNA, 145 bp, synthetic construct
  source 1..145: mol_type = other DNA
tgtattgcaccccttcccatgtcctgccgcttgtattgcaccccttcccatgtcctgcttttgtattgcaccccttcccatgtcctgatcttgtattgcaccccttcccatgtcctacgcttgtattgcaccccttcccatgtcc

SEQ ID NO: 9243 - DNA, 145 bp, synthetic construct
  source 1..145: mol_type = other DNA
ggacatgggaaggggtgcaatacatgccgctggacatgggaaggggtgcaatacatgctttggacatgggaaggggtgcaatacatgatctggacatgggaaggggtgcaatacatacgctggacatgggaaggggtgcaataca

SEQ ID NO: 9244 - DNA, 145 bp, synthetic construct
  source 1..145: mol_type = other DNA
tgtattgctccccctcccatgacatgccgcttgtattgctccccctcccatgacatgcttttgtattgctccccctcccatgacatgatcttgtattgctccccctcccatgacatacgcttgtattgctccccctcccatgaca

SEQ ID NO: 9245 - DNA, 145 bp, synthetic construct
  source 1..145: mol_type = other DNA
tgtcatgggagggggagcaatacatgccgcttgtcatgggagggggagcaatacatgcttttgtcatgggagggggagcaatacatgatcttgtcatgggagggggagcaatacatacgcttgtcatgggagggggagcaataca

SEQ ID NO: 9246 - DNA, 145 bp, synthetic construct
  source 1..145: mol_type = other DNA
tgtattgctccccctcccatgacctgccgcttgtattgctccccctcccatgacctgcttttgtattgctccccctcccatgacctgatcttgtattgctccccctcccatgacctacgcttgtattgctccccctcccatgacc

SEQ ID NO: 9247 - DNA, 145 bp, synthetic construct
  source 1..145: mol_type = other DNA
ggtcatgggagggggagcaatacatgccgctggtcatgggagggggagcaatacatgctttggtcatgggagggggagcaatacatgatctggtcatgggagggggagcaatacatacgctggtcatgggagggggagcaataca

SEQ ID NO: 9248 - DNA, 145 bp, synthetic construct
  source 1..145: mol_type = other DNA
tgtattgctccccctcccatgtcatgccgcttgtattgctccccctcccatgtcatgcttttgtattgctccccctcccatgtcatgatcttgtattgctccccctcccatgtcatacgcttgtattgctccccctcccatgtca

SEQ ID NO: 9249 - DNA, 145 bp, synthetic construct
  source 1..145: mol_type = other DNA
tgacatgggagggggagcaatacatgccgcttgacatgggagggggagcaatacatgcttttgacatgggagggggagcaatacatgatcttgacatgggagggggagcaatacatacgcttgacatgggagggggagcaataca

SEQ ID NO: 9250 - DNA, 145 bp, synthetic construct
  source 1..145: mol_type = other DNA
tgtattgctccccctcccatgtcctgccgcttgtattgctccccctcccatgtcctgcttttgtattgctccccctcccatgtcctgatcttgtattgctccccctcccatgtcctacgcttgtattgctccccctcccatgtcc

SEQ ID NO: 9251 - DNA, 145 bp, synthetic construct
  source 1..145: mol_type = other DNA
ggacatgggagggggagcaatacatgccgctggacatgggagggggagcaatacatgctttggacatgggagggggagcaatacatgatctggacatgggagggggagcaatacatacgctggacatgggagggggagcaataca

SEQ ID NO: 9252 - DNA, 145 bp, synthetic construct
  source 1..145: mol_type = other DNA
tgtattgctccccttcccatgacatgccgcttgtattgctccccttcccatgacatgcttttgtattgctccccttcccatgacatgatcttgtattgctccccttcccatgacatacgcttgtattgctccccttcccatgaca

SEQ ID NO: 9253 - DNA, 145 bp, synthetic construct
  source 1..145: mol_type = other DNA
tgtcatgggaaggggagcaatacatgccgcttgtcatgggaaggggagcaatacatgcttttgtcatgggaaggggagcaatacatgatcttgtcatgggaaggggagcaatacatacgcttgtcatgggaaggggagcaataca

SEQ ID NO: 9254 - DNA, 145 bp, synthetic construct
  source 1..145: mol_type = other DNA
tgtattgctccccttcccatgacctgccgcttgtattgctccccttcccatgacctgcttttgtattgctccccttcccatgacctgatcttgtattgctccccttcccatgacctacgcttgtattgctccccttcccatgacc

SEQ ID NO: 9255 - DNA, 145 bp, synthetic construct
  source 1..145: mol_type = other DNA
ggtcatgggaaggggagcaatacatgccgctggtcatgggaaggggagcaatacatgctttggtcatgggaaggggagcaatacatgatctggtcatgggaaggggagcaatacatacgctggtcatgggaaggggagcaataca

SEQ ID NO: 9256 - DNA, 145 bp, synthetic construct
  source 1..145: mol_type = other DNA
tgtattgctccccttcccatgtcatgccgcttgtattgctccccttcccatgtcatgcttttgtattgctccccttcccatgtcatgatcttgtattgctccccttcccatgtcatacgcttgtattgctccccttcccatgtca

SEQ ID NO: 9257 - DNA, 145 bp, synthetic construct
  source 1..145: mol_type = other DNA
tgacatgggaaggggagcaatacatgccgcttgacatgggaaggggagcaatacatgcttttgacatgggaaggggagcaatacatgatcttgacatgggaaggggagcaatacatacgcttgacatgggaaggggagcaataca

SEQ ID NO: 9258 - DNA, 145 bp, synthetic construct
  source 1..145: mol_type = other DNA
tgtattgctccccttcccatgtcctgccgcttgtattgctccccttcccatgtcctgcttttgtattgctccccttcccatgtcctgatcttgtattgctccccttcccatgtcctacgcttgtattgctccccttcccatgtcc

SEQ ID NO: 9259 - DNA, 145 bp, synthetic construct
  source 1..145: mol_type = other DNA
ggacatgggaaggggagcaatacatgccgctggacatgggaaggggagcaatacatgctttggacatgggaaggggagcaatacatgatctggacatgggaaggggagcaatacatacgctggacatgggaaggggagcaataca

SEQ ID NO: 9260 - DNA, 139 bp, synthetic construct
  source 1..139: mol_type = other DNA
gcctgagggcaatgctttgcctgagggcaatgatctgcctgagggcaatacgctgcctgagggcaatgccgctgcctgagggcaatgctttgcctgagggcaatgatctgcctgagggcaatacgctgcctgagggcaa

SEQ ID NO: 9261 - DNA, 139 bp, synthetic construct
  source 1..139: mol_type = other DNA
ttgccctcaggctgctttttgccctcaggctgatctttgccctcaggctacgctttgccctcaggctgccgctttgccctcaggctgctttttgccctcaggctgatctttgccctcaggctacgctttgccctcaggc

SEQ ID NO: 9262 - DNA, 139 bp, synthetic construct
  source 1..139: mol_type = other DNA
gcctgagggcattgctttgcctgagggcattgatctgcctgagggcattacgctgcctgagggcattgccgctgcctgagggcattgctttgcctgagggcattgatctgcctgagggcattacgctgcctgagggcat

SEQ ID NO: 9263 - DNA, 139 bp, synthetic construct
  source 1..139: mol_type = other DNA
atgccctcaggctgctttatgccctcaggctgatctatgccctcaggctacgctatgccctcaggctgccgctatgccctcaggctgctttatgccctcaggctgatctatgccctcaggctacgctatgccctcaggc

SEQ ID NO: 9264 - DNA, 139 bp, synthetic construct
  source 1..139: mol_type = other DNA
gcctgaggccaatgctttgcctgaggccaatgatctgcctgaggccaatacgctgcctgaggccaatgccgctgcctgaggccaatgctttgcctgaggccaatgatctgcctgaggccaatacgctgcctgaggccaa

SEQ ID NO: 9265 - DNA, 139 bp, synthetic construct
  source 1..139: mol_type = other DNA
ttggcctcaggctgctttttggcctcaggctgatctttggcctcaggctacgctttggcctcaggctgccgctttggcctcaggctgctttttggcctcaggctgatctttggcctcaggctacgctttggcctcaggc

SEQ ID NO: 9266 - DNA, 139 bp, synthetic construct
  source 1..139: mol_type = other DNA
gcctgaggccattgctttgcctgaggccattgatctgcctgaggccattacgctgcctgaggccattgccgctgcctgaggccattgctttgcctgaggccattgatctgcctgaggccattacgctgcctgaggccat

SEQ ID NO: 9267 - DNA, 139 bp, synthetic construct
  source 1..139: mol_type = other DNA
atggcctcaggctgctttatggcctcaggctgatctatggcctcaggctacgctatggcctcaggctgccgctatggcctcaggctgctttatggcctcaggctgatctatggcctcaggctacgctatggcctcaggc

SEQ ID NO: 9268 - DNA, 139 bp, synthetic construct
  source 1..139: mol_type = other DNA
gcctcagggcaatgctttgcctcagggcaatgatctgcctcagggcaatacgctgcctcagggcaatgccgctgcctcagggcaatgctttgcctcagggcaatgatctgcctcagggcaatacgctgcctcagggcaa

SEQ ID NO: 9269 - DNA, 139 bp, synthetic construct
  source 1..139: mol_type = other DNA
ttgccctgaggctgctttttgccctgaggctgatctttgccctgaggctacgctttgccctgaggctgccgctttgccctgaggctgctttttgccctgaggctgatctttgccctgaggctacgctttgccctgaggc

SEQ ID NO: 9270 - DNA, 139 bp, synthetic construct; identical to SEQ ID NO: 7177
  source 1..139: mol_type = other DNA

SEQ ID NO: 9271 - DNA, 139 bp, synthetic construct; identical to SEQ ID NO: 7176
  source 1..139: mol_type = other DNA

SEQ ID NO: 9272 - DNA, 139 bp, synthetic construct
  source 1..139: mol_type = other DNA
gcctcaggccaatgctttgcctcaggccaatgatctgcctcaggccaatacgctgcctcaggccaatgccgctgcctcaggccaatgctttgcctcaggccaatgatctgcctcaggccaatacgctgcctcaggccaa

SEQ ID NO: 9273 - DNA, 139 bp, synthetic construct
  source 1..139: mol_type = other DNA
ttggcctgaggctgctttttggcctgaggctgatctttggcctgaggctacgctttggcctgaggctgccgctttggcctgaggctgctttttggcctgaggctgatctttggcctgaggctacgctttggcctgaggc

SEQ ID NO: 9274 - DNA, 139 bp, synthetic construct
  source 1..139: mol_type = other DNA
gcctcaggccattgctttgcctcaggccattgatctgcctcaggccattacgctgcctcaggccattgccgctgcctcaggccattgctttgcctcaggccattgatctgcctcaggccattacgctgcctcaggccat

SEQ ID NO: 9275 - DNA, 139 bp, synthetic construct
  source 1..139: mol_type = other DNA
atggcctgaggctgctttatggcctgaggctgatctatggcctgaggctacgctatggcctgaggctgccgctatggcctgaggctgctttatggcctgaggctgatctatggcctgaggctacgctatggcctgaggc

SEQ ID NO: 9276 - DNA, 139 bp, synthetic construct
  source 1..139: mol_type = other DNA
ccctgagggcaatgctttccctgagggcaatgatctccctgagggcaatacgctccctgagggcaatgccgctccctgagggcaatgctttccctgagggcaatgatctccctgagggcaatacgctccctgagggcaa

SEQ ID NO: 9277 - DNA, 139 bp, synthetic construct
  source 1..139: mol_type = other DNA
ttgccctcagggtgctttttgccctcagggtgatctttgccctcagggtacgctttgccctcagggtgccgctttgccctcagggtgctttttgccctcagggtgatctttgccctcagggtacgctttgccctcaggg

SEQ ID NO: 9278 - DNA, 139 bp, synthetic construct
  source 1..139: mol_type = other DNA
ccctgagggcattgctttccctgagggcattgatctccctgagggcattacgctccctgagggcattgccgctccctgagggcattgctttccctgagggcattgatctccctgagggcattacgctccctgagggcat

SEQ ID NO: 9279 - DNA, 139 bp, synthetic construct
  source 1..139: mol_type = other DNA
atgccctcagggtgctttatgccctcagggtgatctatgccctcagggtacgctatgccctcagggtgccgctatgccctcagggtgctttatgccctcagggtgatctatgccctcagggtacgctatgccctcaggg

SEQ ID NO: 9280 - DNA, 139 bp, synthetic construct
  source 1..139: mol_type = other DNA
ccctgaggccaatgctttccctgaggccaatgatctccctgaggccaatacgctccctgaggccaatgccgctccctgaggccaatgctttccctgaggccaatgatctccctgaggccaatacgctccctgaggccaa

SEQ ID NO: 9281 - DNA, 139 bp, synthetic construct
  source 1..139: mol_type = other DNA
ttggcctcagggtgctttttggcctcagggtgatctttggcctcagggtacgctttggcctcagggtgccgctttggcctcagggtgctttttggcctcagggtgatctttggcctcagggtacgctttggcctcaggg

SEQ ID NO: 9282 - DNA, 139 bp, synthetic construct
  source 1..139: mol_type = other DNA
ccctgaggccattgctttccctgaggccattgatctccctgaggccattacgctccctgaggccattgccgctccctgaggccattgctttccctgaggccattgatctccctgaggccattacgctccctgaggccat

SEQ ID NO: 9283 - DNA, 139 bp, synthetic construct
  source 1..139: mol_type = other DNA
atggcctcagggtgctttatggcctcagggtgatctatggcctcagggtacgctatggcctcagggtgccgctatggcctcagggtgctttatggcctcagggtgatctatggcctcagggtacgctatggcctcaggg

SEQ ID NO: 9284 - DNA, 139 bp, synthetic construct
  source 1..139: mol_type = other DNA
ccctcagggcaatgctttccctcagggcaatgatctccctcagggcaatacgctccctcagggcaatgccgctccctcagggcaatgctttccctcagggcaatgatctccctcagggcaatacgctccctcagggcaa

SEQ ID NO: 9285 - DNA, 139 bp, synthetic construct
  source 1..139: mol_type = other DNA
ttgccctgagggtgctttttgccctgagggtgatctttgccctgagggtacgctttgccctgagggtgccgctttgccctgagggtgctttttgccctgagggtgatctttgccctgagggtacgctttgccctgaggg

SEQ ID NO: 9286 - DNA, 139 bp, synthetic construct
  source 1..139: mol_type = other DNA
ccctcagggcattgctttccctcagggcattgatctccctcagggcattacgctccctcagggcattgccgctccctcagggcattgctttccctcagggcattgatctccctcagggcattacgctccctcagggcat

SEQ ID NO: 9287 - DNA, 139 bp, synthetic construct
  source 1..139: mol_type = other DNA
atgccctgagggtgctttatgccctgagggtgatctatgccctgagggtacgctatgccctgagggtgccgctatgccctgagggtgctttatgccctgagggtgatctatgccctgagggtacgctatgccctgaggg

SEQ ID NO: 9288 - DNA, 139 bp, synthetic construct
  source 1..139: mol_type = other DNA
ccctcaggccaatgctttccctcaggccaatgatctccctcaggccaatacgctccctcaggccaatgccgctccctcaggccaatgctttccctcaggccaatgatctccctcaggccaatacgctccctcaggccaa

SEQ ID NO: 9289 - DNA, 139 bp, synthetic construct
  source 1..139: mol_type = other DNA
ttggcctgagggtgctttttggcctgagggtgatctttggcctgagggtacgctttggcctgagggtgccgctttggcctgagggtgctttttggcctgagggtgatctttggcctgagggtacgctttggcctgaggg

SEQ ID NO: 9290 - DNA, 139 bp, synthetic construct
  source 1..139: mol_type = other DNA
ccctcaggccattgctttccctcaggccattgatctccctcaggccattacgctccctcaggccattgccgctccctcaggccattgctttccctcaggccattgatctccctcaggccattacgctccctcaggccat

SEQ ID NO: 9291 - DNA, 139 bp, synthetic construct
  source 1..139: mol_type = other DNA
atggcctgagggtgctttatggcctgagggtgatctatggcctgagggtacgctatggcctgagggtgccgctatggcctgagggtgctttatggcctgagggtgatctatggcctgagggtacgctatggcctgaggg

SEQ ID NO: 9292 - DNA, 139 bp, synthetic construct
  source 1..139: mol_type = other DNA
aacatgaaaaaccatgtatacgctaacatgaaaaaccatgtatgccgctaacatgaaaaaccatgtatgctttaacatgaaaaaccatgtatgatctaacatgaaaaaccatgtatacgctaacatgaaaaaccatgta

SEQ ID NO: 9293 - DNA, 139 bp, synthetic construct
  source 1..139: mol_type = other DNA
tacatggtttttcatgtttacgcttacatggtttttcatgtttgccgcttacatggtttttcatgtttgcttttacatggtttttcatgtttgatcttacatggtttttcatgtttacgcttacatggtttttcatgtt

SEQ ID NO: 9294 - DNA, 139 bp, synthetic construct
  source 1..139: mol_type = other DNA
aacatgaaaaaccatgtttacgctaacatgaaaaaccatgtttgccgctaacatgaaaaaccatgtttgctttaacatgaaaaaccatgtttgatctaacatgaaaaaccatgtttacgctaacatgaaaaaccatgtt

SEQ ID NO: 9295 - DNA, 139 bp, synthetic construct
  source 1..139: mol_type = other DNA
aacatggtttttcatgtttacgctaacatggtttttcatgtttgccgctaacatggtttttcatgtttgctttaacatggtttttcatgtttgatctaacatggtttttcatgtttacgctaacatggtttttcatgtt

SEQ ID NO: 9296 - DNA, 139 bp, synthetic construct
  source 1..139: mol_type = other DNA
aacatgaaaatccatgtatacgctaacatgaaaatccatgtatgccgctaacatgaaaatccatgtatgctttaacatgaaaatccatgtatgatctaacatgaaaatccatgtatacgctaacatgaaaatccatgta

SEQ ID NO: 9297 - DNA, 139 bp, synthetic construct
  source 1..139: mol_type = other DNA
tacatggattttcatgtttacgcttacatggattttcatgtttgccgcttacatggattttcatgtttgcttttacatggattttcatgtttgatcttacatggattttcatgtttacgcttacatggattttcatgtt

SEQ ID NO: 9298 - DNA, 139 bp, synthetic construct
  source 1..139: mol_type = other DNA
aacatgaaaatccatgtttacgctaacatgaaaatccatgtttgccgctaacatgaaaatccatgtttgctttaacatgaaaatccatgtttgatctaacatgaaaatccatgtttacgctaacatgaaaatccatgtt

SEQ ID NO: 9299 - DNA, 139 bp, synthetic construct
  source 1..139: mol_type = other DNA
aacatggattttcatgtttacgctaacatggattttcatgtttgccgctaacatggattttcatgtttgctttaacatggattttcatgtttgatctaacatggattttcatgtttacgctaacatggattttcatgtt

SEQ ID NO: 9300 - DNA, 139 bp, synthetic construct
  source 1..139: mol_type = other DNA
aacatgaaataccatgtatacgctaacatgaaataccatgtatgccgctaacatgaaataccatgtatgctttaacatgaaataccatgtatgatctaacatgaaataccatgtatacgctaacatgaaataccatgta

SEQ ID NO: 9301 - DNA, 139 bp, synthetic construct
  source 1..139: mol_type = other DNA
tacatggtatttcatgtttacgcttacatggtatttcatgtttgccgcttacatggtatttcatgtttgcttttacatggtatttcatgtttgatcttacatggtatttcatgtttacgcttacatggtatttcatgtt

SEQ ID NO: 9302 - DNA, 139 bp, synthetic construct
  source 1..139: mol_type = other DNA
aacatgaaataccatgtttacgctaacatgaaataccatgtttgccgctaacatgaaataccatgtttgctttaacatgaaataccatgtttgatctaacatgaaataccatgtttacgctaacatgaaataccatgtt

SEQ ID NO: 9303 - DNA, 139 bp, synthetic construct
  source 1..139: mol_type = other DNA
aacatggtatttcatgtttacgctaacatggtatttcatgtttgccgctaacatggtatttcatgtttgctttaacatggtatttcatgtttgatctaacatggtatttcatgtttacgctaacatggtatttcatgtt

SEQ ID NO: 9304 - DNA, 139 bp, synthetic construct
  source 1..139: mol_type = other DNA
aacatgaaattccatgtatacgctaacatgaaattccatgtatgccgctaacatgaaattccatgtatgctttaacatgaaattccatgtatgatctaacatgaaattccatgtatacgctaacatgaaattccatgta

SEQ ID NO: 9305 - DNA, 139 bp, synthetic construct
  source 1..139: mol_type = other DNA
tacatggaatttcatgtttacgcttacatggaatttcatgtttgccgcttacatggaatttcatgtttgcttttacatggaatttcatgtttgatcttacatggaatttcatgtttacgcttacatggaatttcatgtt

SEQ ID NO: 9306 - DNA, 139 bp, synthetic construct
  source 1..139: mol_type = other DNA
aacatgaaattccatgtttacgctaacatgaaattccatgtttgccgctaacatgaaattccatgtttgctttaacatgaaattccatgtttgatctaacatgaaattccatgtttacgctaacatgaaattccatgtt

SEQ ID NO: 9307 - DNA, 139 bp, synthetic construct
  source 1..139: mol_type = other DNA
aacatggaatttcatgtttacgctaacatggaatttcatgtttgccgctaacatggaatttcatgtttgctttaacatggaatttcatgtttgatctaacatggaatttcatgtttacgctaacatggaatttcatgtt

SEQ ID NO: 9308 - DNA, 139 bp, synthetic construct
  source 1..139: mol_type = other DNA
aacatgaataaccatgtatacgctaacatgaataaccatgtatgccgctaacatgaataaccatgtatgctttaacatgaataaccatgtatgatctaacatgaataaccatgtatacgctaacatgaataaccatgta

SEQ ID NO: 9309 - DNA, 139 bp, synthetic construct
  source 1..139: mol_type = other DNA
tacatggttattcatgtttacgcttacatggttattcatgtttgccgcttacatggttattcatgtttgcttttacatggttattcatgtttgatcttacatggttattcatgtttacgcttacatggttattcatgtt

SEQ ID NO: 9310 - DNA, 139 bp, synthetic construct
  source 1..139: mol_type = other DNA
aacatgaataaccatgtttacgctaacatgaataaccatgtttgccgctaacatgaataaccatgtttgctttaacatgaataaccatgtttgatctaacatgaataaccatgtttacgctaacatgaataaccatgtt

SEQ ID NO: 9311 - DNA, 139 bp, synthetic construct
  source 1..139: mol_type = other DNA
aacatggttattcatgtttacgctaacatggttattcatgtttgccgctaacatggttattcatgtttgctttaacatggttattcatgtttgatctaacatggttattcatgtttacgctaacatggttattcatgtt

SEQ ID NO: 9312 - DNA, 139 bp, synthetic construct
  source 1..139: mol_type = other DNA
aacatgaatatccatgtatacgctaacatgaatatccatgtatgccgctaacatgaatatccatgtatgctttaacatgaatatccatgtatgatctaacatgaatatccatgtatacgctaacatgaatatccatgta

SEQ ID NO: 9313 - DNA, 139 bp, synthetic construct
  source 1..139: mol_type = other DNA
tacatggatattcatgtttacgcttacatggatattcatgtttgccgcttacatggatattcatgtttgcttttacatggatattcatgtttgatcttacatggatattcatgtttacgcttacatggatattcatgtt

SEQ ID NO: 9314 - DNA, 139 bp, synthetic construct
  source 1..139: mol_type = other DNA
aacatgaatatccatgtttacgctaacatgaatatccatgtttgccgctaacatgaatatccatgtttgctttaacatgaatatccatgtttgatctaacatgaatatccatgtttacgctaacatgaatatccatgtt

SEQ ID NO: 9315 - DNA, 139 bp, synthetic construct
  source 1..139: mol_type = other DNA
aacatggatattcatgtttacgctaacatggatattcatgtttgccgctaacatggatattcatgtttgctttaacatggatattcatgtttgatctaacatggatattcatgtttacgctaacatggatattcatgtt

SEQ ID NO: 9316 - DNA, 139 bp, synthetic construct
  source 1..139: mol_type = other DNA
aacatgaattaccatgtatacgctaacatgaattaccatgtatgccgctaacatgaattaccatgtatgctttaacatgaattaccatgtatgatctaacatgaattaccatgtatacgctaacatgaattaccatgta

SEQ ID NO: 9317 - DNA, 139 bp, synthetic construct
  source 1..139: mol_type = other DNA
tacatggtaattcatgtttacgcttacatggtaattcatgtttgccgcttacatggtaattcatgtttgcttttacatggtaattcatgtttgatcttacatggtaattcatgtttacgcttacatggtaattcatgtt

SEQ ID NO: 9318 - DNA, 139 bp, synthetic construct
  source 1..139: mol_type = other DNA
aacatgaattaccatgtttacgctaacatgaattaccatgtttgccgctaacatgaattaccatgtttgctttaacatgaattaccatgtttgatctaacatgaattaccatgtttacgctaacatgaattaccatgtt

SEQ ID NO: 9319 - DNA, 139 bp, synthetic construct
  source 1..139: mol_type = other DNA
aacatggtaattcatgtttacgctaacatggtaattcatgtttgccgctaacatggtaattcatgtttgctttaacatggtaattcatgtttgatctaacatggtaattcatgtttacgctaacatggtaattcatgtt

SEQ ID NO: 9320 - DNA, 139 bp, synthetic construct
  source 1..139: mol_type = other DNA
aacatgaatttccatgtatacgctaacatgaatttccatgtatgccgctaacatgaatttccatgtatgctttaacatgaatttccatgtatgatctaacatgaatttccatgtatacgctaacatgaatttccatgta

SEQ ID NO: 9321 - DNA, 139 bp, synthetic construct
  source 1..139: mol_type = other DNA
tacatggaaattcatgtttacgcttacatggaaattcatgtttgccgcttacatggaaattcatgtttgcttttacatggaaattcatgtttgatcttacatggaaattcatgtttacgcttacatggaaattcatgtt

SEQ ID NO: 9322 - DNA, 139 bp, synthetic construct
  source 1..139: mol_type = other DNA
aacatgaatttccatgtttacgctaacatgaatttccatgtttgccgctaacatgaatttccatgtttgctttaacatgaatttccatgtttgatctaacatgaatttccatgtttacgctaacatgaatttccatgtt

SEQ ID NO: 9323 - DNA, 139 bp, synthetic construct
  source 1..139: mol_type = other DNA
aacatggaaattcatgtttacgctaacatggaaattcatgtttgccgctaacatggaaattcatgtttgctttaacatggaaattcatgtttgatctaacatggaaattcatgtttacgctaacatggaaattcatgtt

SEQ ID NO: 9324 - DNA, 139 bp, synthetic construct
  source 1..139: mol_type = other DNA
aacatgataaaccatgtatacgctaacatgataaaccatgtatgccgctaacatgataaaccatgtatgctttaacatgataaaccatgtatgatctaacatgataaaccatgtatacgctaacatgataaaccatgta

SEQ ID NO: 9325 - DNA, 139 bp, synthetic construct
  source 1..139: mol_type = other DNA
tacatggtttatcatgtttacgcttacatggtttatcatgtttgccgcttacatggtttatcatgtttgcttttacatggtttatcatgtttgatcttacatggtttatcatgtttacgcttacatggtttatcatgtt

SEQ ID NO: 9326 - DNA, 139 bp, synthetic construct
  source 1..139: mol_type = other DNA
aacatgataaaccatgtttacgctaacatgataaaccatgtttgccgctaacatgataaaccatgtttgctttaacatgataaaccatgtttgatctaacatgataaaccatgtttacgctaacatgataaaccatgtt

SEQ ID NO: 9327 - DNA, 139 bp, synthetic construct
  source 1..139: mol_type = other DNA
aacatggtttatcatgtttacgctaacatggtttatcatgtttgccgctaacatggtttatcatgtttgctttaacatggtttatcatgtttgatctaacatggtttatcatgtttacgctaacatggtttatcatgtt

SEQ ID NO: 9328 - DNA, 139 bp, synthetic construct
  source 1..139: mol_type = other DNA
aacatgataatccatgtatacgctaacatgataatccatgtatgccgctaacatgataatccatgtatgctttaacatgataatccatgtatgatctaacatgataatccatgtatacgctaacatgataatccatgta

SEQ ID NO: 9329 - DNA, 139 bp, synthetic construct
  source 1..139: mol_type = other DNA
tacatggattatcatgtttacgcttacatggattatcatgtttgccgcttacatggattatcatgtttgcttttacatggattatcatgtttgatcttacatggattatcatgtttacgcttacatggattatcatgtt

SEQ ID NO: 9330 - DNA, 139 bp, synthetic construct
  source 1..139: mol_type = other DNA
aacatgataatccatgtttacgctaacatgataatccatgtttgccgctaacatgataatccatgtttgctttaacatgataatccatgtttgatctaacatgataatccatgtttacgctaacatgataatccatgtt

SEQ ID NO: 9331 - DNA, 139 bp, synthetic construct
  source 1..139: mol_type = other DNA
aacatggattatcatgtttacgctaacatggattatcatgtttgccgctaacatggattatcatgtttgctttaacatggattatcatgtttgatctaacatggattatcatgtttacgctaacatggattatcatgtt

SEQ ID NO: 9332 - DNA, 139 bp, synthetic construct
  source 1..139: mol_type = other DNA
aacatgatataccatgtatacgctaacatgatataccatgtatgccgctaacatgatataccatgtatgctttaacatgatataccatgtatgatctaacatgatataccatgtatacgctaacatgatataccatgta

SEQ ID NO: 9333 - DNA, 139 bp, synthetic construct
  source 1..139: mol_type = other DNA
tacatggtatatcatgtttacgcttacatggtatatcatgtttgccgcttacatggtatatcatgtttgcttttacatggtatatcatgtttgatcttacatggtatatcatgtttacgcttacatggtatatcatgtt

SEQ ID NO: 9334 - DNA, 139 bp, synthetic construct
  source 1..139: mol_type = other DNA
aacatgatataccatgtttacgctaacatgatataccatgtttgccgctaacatgatataccatgtttgctttaacatgatataccatgtttgatctaacatgatataccatgtttacgctaacatgatataccatgtt

SEQ ID NO: 9335 - DNA, 139 bp, synthetic construct
  source 1..139: mol_type = other DNA
aacatggtatatcatgtttacgctaacatggtatatcatgtttgccgctaacatggtatatcatgtttgctttaacatggtatatcatgtttgatctaacatggtatatcatgtttacgctaacatggtatatcatgtt

SEQ ID NO: 9336 - DNA, 139 bp, synthetic construct
  source 1..139: mol_type = other DNA
aacatgatattccatgtatacgctaacatgatattccatgtatgccgctaacatgatattccatgtatgctttaacatgatattccatgtatgatctaacatgatattccatgtatacgctaacatgatattccatgta

SEQ ID NO: 9337 - DNA, 139 bp, synthetic construct
  source 1..139: mol_type = other DNA
tacatggaatatcatgtttacgcttacatggaatatcatgtttgccgcttacatggaatatcatgtttgcttttacatggaatatcatgtttgatcttacatggaatatcatgtttacgcttacatggaatatcatgtt

SEQ ID NO: 9338 - DNA, 139 bp, synthetic construct
  source 1..139: mol_type = other DNA
aacatgatattccatgtttacgctaacatgatattccatgtttgccgctaacatgatattccatgtttgctttaacatgatattccatgtttgatctaacatgatattccatgtttacgctaacatgatattccatgtt

SEQ ID NO: 9339 - DNA, 139 bp, synthetic construct
  source 1..139: mol_type = other DNA
aacatggaatatcatgtttacgctaacatggaatatcatgtttgccgctaacatggaatatcatgtttgctttaacatggaatatcatgtttgatctaacatggaatatcatgtttacgctaacatggaatatcatgtt

SEQ ID NO: 9340 - DNA, 139 bp, synthetic construct
  source 1..139: mol_type = other DNA
aacatgattaaccatgtatacgctaacatgattaaccatgtatgccgctaacatgattaaccatgtatgctttaacatgattaaccatgtatgatctaacatgattaaccatgtatacgctaacatgattaaccatgta

SEQ ID NO: 9341 - DNA, 139 bp, synthetic construct
  source 1..139: mol_type = other DNA
tacatggttaatcatgtttacgcttacatggttaatcatgtttgccgcttacatggttaatcatgtttgcttttacatggttaatcatgtttgatcttacatggttaatcatgtttacgcttacatggttaatcatgtt

SEQ ID NO: 9342 - DNA, 139 bp, synthetic construct
  source 1..139: mol_type = other DNA
aacatgattaaccatgtttacgctaacatgattaaccatgtttgccgctaacatgattaaccatgtttgctttaacatgattaaccatgtttgatctaacatgattaaccatgtttacgctaacatgattaaccatgtt

SEQ ID NO: 9343 - DNA, 139 bp, synthetic construct
  source 1..139: mol_type = other DNA
aacatggttaatcatgtttacgctaacatggttaatcatgtttgccgctaacatggttaatcatgtttgctttaacatggttaatcatgtttgatctaacatggttaatcatgtttacgctaacatggttaatcatgtt

SEQ ID NO: 9344 - DNA, 139 bp, synthetic construct
  source 1..139: mol_type = other DNA
aacatgattatccatgtatacgctaacatgattatccatgtatgccgctaacatgattatccatgtatgctttaacatgattatccatgtatgatctaacatgattatccatgtatacgctaacatgattatccatgta

SEQ ID NO: 9345 - DNA, 139 bp, synthetic construct
  source 1..139: mol_type = other DNA
tacatggataatcatgtttacgcttacatggataatcatgtttgccgcttacatggataatcatgtttgcttttacatggataatcatgtttgatcttacatggataatcatgtttacgcttacatggataatcatgtt

SEQ ID NO: 9346 - DNA, 139 bp, synthetic construct
  source 1..139: mol_type = other DNA
aacatgattatccatgtttacgctaacatgattatccatgtttgccgctaacatgattatccatgtttgctttaacatgattatccatgtttgatctaacatgattatccatgtttacgctaacatgattatccatgtt

SEQ ID NO: 9347 - DNA, 139 bp, synthetic construct
  source 1..139: mol_type = other DNA
aacatggataatcatgtttacgctaacatggataatcatgtttgccgctaacatggataatcatgtttgctttaacatggataatcatgtttgatctaacatggataatcatgtttacgctaacatggataatcatgtt

SEQ ID NO: 9348 - DNA, 139 bp, synthetic construct
  source 1..139: mol_type = other DNA
aacatgatttaccatgtatacgctaacatgatttaccatgtatgccgctaacatgatttaccatgtatgctttaacatgatttaccatgtatgatctaacatgatttaccatgtatacgctaacatgatttaccatgta

SEQ ID NO: 9349 - DNA, 139 bp, synthetic construct
  source 1..139: mol_type = other DNA
tacatggtaaatcatgtttacgcttacatggtaaatcatgtttgccgcttacatggtaaatcatgtttgcttttacatggtaaatcatgtttgatcttacatggtaaatcatgtttacgcttacatggtaaatcatgtt

SEQ ID NO: 9350 - DNA, 139 bp, synthetic construct
  source 1..139: mol_type = other DNA
aacatgatttaccatgtttacgctaacatgatttaccatgtttgccgctaacatgatttaccatgtttgctttaacatgatttaccatgtttgatctaacatgatttaccatgtttacgctaacatgatttaccatgtt

SEQ ID NO: 9351 - DNA, 139 bp, synthetic construct
  source 1..139: mol_type = other DNA
aacatggtaaatcatgtttacgctaacatggtaaatcatgtttgccgctaacatggtaaatcatgtttgctttaacatggtaaatcatgtttgatctaacatggtaaatcatgtttacgctaacatggtaaatcatgtt

SEQ ID NO: 9352 - DNA, 139 bp, synthetic construct
  source 1..139: mol_type = other DNA
aacatgattttccatgtatacgctaacatgattttccatgtatgccgctaacatgattttccatgtatgctttaacatgattttccatgtatgatctaacatgattttccatgtatacgctaacatgattttccatgta

SEQ ID NO: 9353 - DNA, 139 bp, synthetic construct
  source 1..139: mol_type = other DNA
tacatggaaaatcatgtttacgcttacatggaaaatcatgtttgccgcttacatggaaaatcatgtttgcttttacatggaaaatcatgtttgatcttacatggaaaatcatgtttacgcttacatggaaaatcatgtt

SEQ ID NO: 9354 - DNA, 139 bp, synthetic construct
  source 1..139: mol_type = other DNA
aacatgattttccatgtttacgctaacatgattttccatgtttgccgctaacatgattttccatgtttgctttaacatgattttccatgtttgatctaacatgattttccatgtttacgctaacatgattttccatgtt

SEQ ID NO: 9355 - DNA, 139 bp, synthetic construct
  source 1..139: mol_type = other DNA
aacatggaaaatcatgtttacgctaacatggaaaatcatgtttgccgctaacatggaaaatcatgtttgctttaacatggaaaatcatgtttgatctaacatggaaaatcatgtttacgctaacatggaaaatcatgtt

SEQ ID NO: 9356 - DNA, 139 bp, synthetic construct
  source 1..139: mol_type = other DNA
tacatgaaaaaccatgtatacgcttacatgaaaaaccatgtatgccgcttacatgaaaaaccatgtatgcttttacatgaaaaaccatgtatgatcttacatgaaaaaccatgtatacgcttacatgaaaaaccatgta

SEQ ID NO: 9357 - DNA, 139 bp, synthetic construct
  source 1..139: mol_type = other DNA
tacatggtttttcatgtatacgcttacatggtttttcatgtatgccgcttacatggtttttcatgtatgcttttacatggtttttcatgtatgatcttacatggtttttcatgtatacgcttacatggtttttcatgta

SEQ ID NO: 9358 - DNA, 139 bp, synthetic construct
  source 1..139: mol_type = other DNA
tacatgaaaaaccatgtttacgcttacatgaaaaaccatgtttgccgcttacatgaaaaaccatgtttgcttttacatgaaaaaccatgtttgatcttacatgaaaaaccatgtttacgcttacatgaaaaaccatgtt

SEQ ID NO: 9359 - DNA, 139 bp, synthetic construct
  source 1..139: mol_type = other DNA
aacatggtttttcatgtatacgctaacatggtttttcatgtatgccgctaacatggtttttcatgtatgctttaacatggtttttcatgtatgatctaacatggtttttcatgtatacgctaacatggtttttcatgta

SEQ ID NO: 9360 - DNA, 139 bp, synthetic construct
  source 1..139: mol_type = other DNA
tacatgaaaatccatgtatacgcttacatgaaaatccatgtatgccgcttacatgaaaatccatgtatgcttttacatgaaaatccatgtatgatcttacatgaaaatccatgtatacgcttacatgaaaatccatgta

SEQ ID NO: 9361 - DNA, 139 bp, synthetic construct
  source 1..139: mol_type = other DNA
tacatggattttcatgtatacgcttacatggattttcatgtatgccgcttacatggattttcatgtatgcttttacatggattttcatgtatgatcttacatggattttcatgtatacgcttacatggattttcatgta

SEQ ID NO: 9362 - DNA, 139 bp, synthetic construct
  source 1..139: mol_type = other DNA
tacatgaaaatccatgtttacgcttacatgaaaatccatgtttgccgcttacatgaaaatccatgtttgcttttacatgaaaatccatgtttgatcttacatgaaaatccatgtttacgcttacatgaaaatccatgtt

SEQ ID NO: 9363 - DNA, 139 bp, synthetic construct
  source 1..139: mol_type = other DNA
aacatggattttcatgtatacgctaacatggattttcatgtatgccgctaacatggattttcatgtatgctttaacatggattttcatgtatgatctaacatggattttcatgtatacgctaacatggattttcatgta

SEQ ID NO: 9364 - DNA, 139 bp, synthetic construct
  source 1..139: mol_type = other DNA
tacatgaaataccatgtatacgcttacatgaaataccatgtatgccgcttacatgaaataccatgtatgcttttacatgaaataccatgtatgatcttacatgaaataccatgtatacgcttacatgaaataccatgta

SEQ ID NO: 9365 - DNA, 139 bp, synthetic construct
  source 1..139: mol_type = other DNA
tacatggtatttcatgtatacgcttacatggtatttcatgtatgccgcttacatggtatttcatgtatgcttttacatggtatttcatgtatgatcttacatggtatttcatgtatacgcttacatggtatttcatgta

SEQ ID NO: 9366 - DNA, 139 bp, synthetic construct
  source 1..139: mol_type = other DNA
tacatgaaataccatgtttacgcttacatgaaataccatgtttgccgcttacatgaaataccatgtttgcttttacatgaaataccatgtttgatcttacatgaaataccatgtttacgcttacatgaaataccatgtt

SEQ ID NO: 9367 - DNA, 139 bp, synthetic construct
  source 1..139: mol_type = other DNA
aacatggtatttcatgtatacgctaacatggtatttcatgtatgccgctaacatggtatttcatgtatgctttaacatggtatttcatgtatgatctaacatggtatttcatgtatacgctaacatggtatttcatgta

SEQ ID NO: 9368 - DNA, 139 bp, synthetic construct
  source 1..139: mol_type = other DNA
tacatgaaattccatgtatacgcttacatgaaattccatgtatgccgcttacatgaaattccatgtatgcttttacatgaaattccatgtatgatcttacatgaaattccatgtatacgcttacatgaaattccatgta

SEQ ID NO: 9369 - DNA, 139 bp, synthetic construct
  source 1..139: mol_type = other DNA
tacatggaatttcatgtatacgcttacatggaatttcatgtatgccgcttacatggaatttcatgtatgcttttacatggaatttcatgtatgatcttacatggaatttcatgtatacgcttacatggaatttcatgta

SEQ ID NO: 9370 - DNA, 139 bp, synthetic construct
  source 1..139: mol_type = other DNA
tacatgaaattccatgtttacgcttacatgaaattccatgtttgccgcttacatgaaattccatgtttgcttttacatgaaattccatgtttgatcttacatgaaattccatgtttacgcttacatgaaattccatgtt

SEQ ID NO: 9371 - DNA, 139 bp, synthetic construct
  source 1..139: mol_type = other DNA
aacatggaatttcatgtatacgctaacatggaatttcatgtatgccgctaacatggaatttcatgtatgctttaacatggaatttcatgtatgatctaacatggaatttcatgtatacgctaacatggaatttcatgta

SEQ ID NO: 9372 - DNA, 139 bp, synthetic construct
  source 1..139: mol_type = other DNA
tacatgaataaccatgtatacgcttacatgaataaccatgtatgccgcttacatgaataaccatgtatgcttttacatgaataaccatgtatgatcttacatgaataaccatgtatacgcttacatgaataaccatgta

SEQ ID NO: 9373 - DNA, 139 bp, synthetic construct
  source 1..139: mol_type = other DNA
tacatggttattcatgtatacgcttacatggttattcatgtatgccgcttacatggttattcatgtatgcttttacatggttattcatgtatgatcttacatggttattcatgtatacgcttacatggttattcatgta

SEQ ID NO: 9374 - DNA, 139 bp, synthetic construct
  source 1..139: mol_type = other DNA
tacatgaataaccatgtttacgcttacatgaataaccatgtttgccgcttacatgaataaccatgtttgcttttacatgaataaccatgtttgatcttacatgaataaccatgtttacgcttacatgaataaccatgtt

SEQ ID NO: 9375 - DNA, 139 bp, synthetic construct
  source 1..139: mol_type = other DNA
aacatggttattcatgtatacgctaacatggttattcatgtatgccgctaacatggttattcatgtatgctttaacatggttattcatgtatgatctaacatggttattcatgtatacgctaacatggttattcatgta

SEQ ID NO: 9376 - DNA, 139 bp, synthetic construct
  source 1..139: mol_type = other DNA
tacatgaatatccatgtatacgcttacatgaatatccatgtatgccgcttacatgaatatccatgtatgcttttacatgaatatccatgtatgatcttacatgaatatccatgtatacgcttacatgaatatccatgta

SEQ ID NO: 9377 - DNA, 139 bp, synthetic construct
  source 1..139: mol_type = other DNA
tacatggatattcatgtatacgcttacatggatattcatgtatgccgcttacatggatattcatgtatgcttttacatggatattcatgtatgatcttacatggatattcatgtatacgcttacatggatattcatgta

SEQ ID NO: 9378 - DNA, 139 bp, synthetic construct
  source 1..139: mol_type = other DNA
tacatgaatatccatgtttacgcttacatgaatatccatgtttgccgcttacatgaatatccatgtttgcttttacatgaatatccatgtttgatcttacatgaatatccatgtttacgcttacatgaatatccatgtt

SEQ ID NO: 9379 - DNA, 139 bp, synthetic construct
  source 1..139: mol_type = other DNA
aacatggatattcatgtatacgctaacatggatattcatgtatgccgctaacatggatattcatgtatgctttaacatggatattcatgtatgatctaacatggatattcatgtatacgctaacatggatattcatgta

SEQ ID NO: 9380 - DNA, 139 bp, synthetic construct
  source 1..139: mol_type = other DNA
tacatgaattaccatgtatacgcttacatgaattaccatgtatgccgcttacatgaattaccatgtatgcttttacatgaattaccatgtatgatcttacatgaattaccatgtatacgcttacatgaattaccatgta

SEQ ID NO: 9381 - DNA, 139 bp, synthetic construct
  source 1..139: mol_type = other DNA
tacatggtaattcatgtatacgcttacatggtaattcatgtatgccgcttacatggtaattcatgtatgcttttacatggtaattcatgtatgatcttacatggtaattcatgtatacgcttacatggtaattcatgta

SEQ ID NO: 9382 - DNA, 139 bp, synthetic construct
  source 1..139: mol_type = other DNA
tacatgaattaccatgtttacgcttacatgaattaccatgtttgccgcttacatgaattaccatgtttgcttttacatgaattaccatgtttgatcttacatgaattaccatgtttacgcttacatgaattaccatgtt

SEQ ID NO: 9383 - DNA, 139 bp, synthetic construct
  source 1..139: mol_type = other DNA
aacatggtaattcatgtatacgctaacatggtaattcatgtatgccgctaacatggtaattcatgtatgctttaacatggtaattcatgtatgatctaacatggtaattcatgtatacgctaacatggtaattcatgta

SEQ ID NO: 9384 - DNA, 139 bp, synthetic construct
  source 1..139: mol_type = other DNA
tacatgaatttccatgtatacgcttacatgaatttccatgtatgccgcttacatgaatttccatgtatgcttttacatgaatttccatgtatgatcttacatgaatttccatgtatacgcttacatgaatttccatgta

SEQ ID NO: 9385 - DNA, 139 bp, synthetic construct
  source 1..139: mol_type = other DNA
tacatggaaattcatgtatacgcttacatggaaattcatgtatgccgcttacatggaaattcatgtatgcttttacatggaaattcatgtatgatcttacatggaaattcatgtatacgcttacatggaaattcatgta

SEQ ID NO: 9386 - DNA, 139 bp, synthetic construct
  source 1..139: mol_type = other DNA
tacatgaatttccatgtttacgcttacatgaatttccatgtttgccgcttacatgaatttccatgtttgcttttacatgaatttccatgtttgatcttacatgaatttccatgtttacgcttacatgaatttccatgtt

SEQ ID NO: 9387 - DNA, 139 bp, synthetic construct
  source 1..139: mol_type = other DNA
aacatggaaattcatgtatacgctaacatggaaattcatgtatgccgctaacatggaaattcatgtatgctttaacatggaaattcatgtatgatctaacatggaaattcatgtatacgctaacatggaaattcatgta

SEQ ID NO: 9388 - DNA, 139 bp, synthetic construct
  source 1..139: mol_type = other DNA
tacatgataaaccatgtatacgcttacatgataaaccatgtatgccgcttacatgataaaccatgtatgcttttacatgataaaccatgtatgatcttacatgataaaccatgtatacgcttacatgataaaccatgta

SEQ ID NO: 9389 - DNA, 139 bp, synthetic construct
  source 1..139: mol_type = other DNA
tacatggtttatcatgtatacgcttacatggtttatcatgtatgccgcttacatggtttatcatgtatgcttttacatggtttatcatgtatgatcttacatggtttatcatgtatacgcttacatggtttatcatgta

SEQ ID NO: 9390 - DNA, 139 bp, synthetic construct
  source 1..139: mol_type = other DNA
tacatgataaaccatgtttacgcttacatgataaaccatgtttgccgcttacatgataaaccatgtttgcttttacatgataaaccatgtttgatcttacatgataaaccatgtttacgcttacatgataaaccatgtt

SEQ ID NO: 9391 - DNA, 139 bp, synthetic construct
  source 1..139: mol_type = other DNA
aacatggtttatcatgtatacgctaacatggtttatcatgtatgccgctaacatggtttatcatgtatgctttaacatggtttatcatgtatgatctaacatggtttatcatgtatacgctaacatggtttatcatgta

SEQ ID NO: 9392 - DNA, 139 bp, synthetic construct
  source 1..139: mol_type = other DNA
tacatgataatccatgtatacgcttacatgataatccatgtatgccgcttacatgataatccatgtatgcttttacatgataatccatgtatgatcttacatgataatccatgtatacgcttacatgataatccatgta

SEQ ID NO: 9393 - DNA, 139 bp, synthetic construct
  source 1..139: mol_type = other DNA
tacatggattatcatgtatacgcttacatggattatcatgtatgccgcttacatggattatcatgtatgcttttacatggattatcatgtatgatcttacatggattatcatgtatacgcttacatggattatcatgta

SEQ ID NO: 9394 - DNA, 139 bp, synthetic construct
  source 1..139: mol_type = other DNA
tacatgataatccatgtttacgcttacatgataatccatgtttgccgcttacatgataatccatgtttgcttttacatgataatccatgtttgatcttacatgataatccatgtttacgcttacatgataatccatgtt

SEQ ID NO: 9395 - DNA, 139 bp, synthetic construct
  source 1..139: mol_type = other DNA
aacatggattatcatgtatacgctaacatggattatcatgtatgccgctaacatggattatcatgtatgctttaacatggattatcatgtatgatctaacatggattatcatgtatacgctaacatggattatcatgta

SEQ ID NO: 9396 - DNA, 139 bp, synthetic construct
  source 1..139: mol_type = other DNA
tacatgatataccatgtatacgcttacatgatataccatgtatgccgcttacatgatataccatgtatgcttttacatgatataccatgtatgatcttacatgatataccatgtatacgcttacatgatataccatgta

SEQ ID NO: 9397 - DNA, 139 bp, synthetic construct
  source 1..139: mol_type = other DNA
tacatggtatatcatgtatacgcttacatggtatatcatgtatgccgcttacatggtatatcatgtatgcttttacatggtatatcatgtatgatcttacatggtatatcatgtatacgcttacatggtatatcatgta

SEQ ID NO: 9398 - DNA, 139 bp, synthetic construct
  source 1..139: mol_type = other DNA
tacatgatataccatgtttacgcttacatgatataccatgtttgccgcttacatgatataccatgtttgcttttacatgatataccatgtttgatcttacatgatataccatgtttacgcttacatgatataccatgtt

SEQ ID NO: 9399 - DNA, 139 bp, synthetic construct
  source 1..139: mol_type = other DNA
aacatggtatatcatgtatacgctaacatggtatatcatgtatgccgctaacatggtatatcatgtatgctttaacatggtatatcatgtatgatctaacatggtatatcatgtatacgctaacatggtatatcatgta

SEQ ID NO: 9400 - DNA, 139 bp, synthetic construct
  source 1..139: mol_type = other DNA
tacatgatattccatgtatacgcttacatgatattccatgtatgccgcttacatgatattccatgtatgcttttacatgatattccatgtatgatcttacatgatattccatgtatacgcttacatgatattccatgta

SEQ ID NO: 9401 - DNA, 139 bp, synthetic construct
  source 1..139: mol_type = other DNA
tacatggaatatcatgtatacgcttacatggaatatcatgtatgccgcttacatggaatatcatgtatgcttttacatggaatatcatgtatgatcttacatggaatatcatgtatacgcttacatggaatatcatgta

SEQ ID NO: 9402 - DNA, 139 bp, synthetic construct
  source 1..139: mol_type = other DNA
tacatgatattccatgtttacgcttacatgatattccatgtttgccgcttacatgatattccatgtttgcttttacatgatattccatgtttgatcttacatgatattccatgtttacgcttacatgatattccatgtt

SEQ ID NO: 9403 - DNA, 139 bp, synthetic construct
  source 1..139: mol_type = other DNA
aacatggaatatcatgtatacgctaacatggaatatcatgtatgccgctaacatggaatatcatgtatgctttaacatggaatatcatgtatgatctaacatggaatatcatgtatacgctaacatggaatatcatgta

SEQ ID NO: 9404 - DNA, 139 bp, synthetic construct
  source 1..139: mol_type = other DNA
tacatgattaaccatgtatacgcttacatgattaaccatgtatgccgcttacatgattaaccatgtatgcttttacatgattaaccatgtatgatcttacatgattaaccatgtatacgcttacatgattaaccatgta

SEQ ID NO: 9405 - DNA, 139 bp, synthetic construct
  source 1..139: mol_type = other DNA
tacatggttaatcatgtatacgcttacatggttaatcatgtatgccgcttacatggttaatcatgtatgcttttacatggttaatcatgtatgatcttacatggttaatcatgtatacgcttacatggttaatcatgta

SEQ ID NO: 9406 - DNA, 139 bp, synthetic construct
  source 1..139: mol_type = other DNA
tacatgattaaccatgtttacgcttacatgattaaccatgtttgccgcttacatgattaaccatgtttgcttttacatgattaaccatgtttgatcttacatgattaaccatgtttacgcttacatgattaaccatgtt

SEQ ID NO: 9407 - DNA, 139 bp, synthetic construct
  source 1..139: mol_type = other DNA
aacatggttaatcatgtatacgctaacatggttaatcatgtatgccgctaacatggttaatcatgtatgctttaacatggttaatcatgtatgatctaacatggttaatcatgtatacgctaacatggttaatcatgta

SEQ ID NO: 9408 - DNA, 139 bp, synthetic construct
  source 1..139: mol_type = other DNA
tacatgattatccatgtatacgcttacatgattatccatgtatgccgcttacatgattatccatgtatgcttttacatgattatccatgtatgatcttacatgattatccatgtatacgcttacatgattatccatgta

SEQ ID NO: 9409 - DNA, 139 bp, synthetic construct
  source 1..139: mol_type = other DNA
tacatggataatcatgtatacgcttacatggataatcatgtatgccgcttacatggataatcatgtatgcttttacatggataatcatgtatgatcttacatggataatcatgtatacgcttacatggataatcatgta

SEQ ID NO: 9410 - DNA, 139 bp, synthetic construct
  source 1..139: mol_type = other DNA
tacatgattatccatgtttacgcttacatgattatccatgtttgccgcttacatgattatccatgtttgcttttacatgattatccatgtttgatcttacatgattatccatgtttacgcttacatgattatccatgtt

SEQ ID NO: 9411 - DNA, 139 bp, synthetic construct
  source 1..139: mol_type = other DNA
aacatggataatcatgtatacgctaacatggataatcatgtatgccgctaacatggataatcatgtatgctttaacatggataatcatgtatgatctaacatggataatcatgtatacgctaacatggataatcatgta

SEQ ID NO: 9412 - DNA, 139 bp, synthetic construct
  source 1..139: mol_type = other DNA
tacatgatttaccatgtatacgcttacatgatttaccatgtatgccgcttacatgatttaccatgtatgcttttacatgatttaccatgtatgatcttacatgatttaccatgtatacgcttacatgatttaccatgta

SEQ ID NO: 9413 - DNA, 139 bp, synthetic construct
  source 1..139: mol_type = other DNA
tacatggtaaatcatgtatacgcttacatggtaaatcatgtatgccgcttacatggtaaatcatgtatgcttttacatggtaaatcatgtatgatcttacatggtaaatcatgtatacgcttacatggtaaatcatgta

SEQ ID NO: 9414 - DNA, 139 bp, synthetic construct
  source 1..139: mol_type = other DNA
tacatgatttaccatgtttacgcttacatgatttaccatgtttgccgcttacatgatttaccatgtttgcttttacatgatttaccatgtttgatcttacatgatttaccatgtttacgcttacatgatttaccatgtt

SEQ ID NO: 9415 - DNA, 139 bp, synthetic construct
  source 1..139: mol_type = other DNA
aacatggtaaatcatgtatacgctaacatggtaaatcatgtatgccgctaacatggtaaatcatgtatgctttaacatggtaaatcatgtatgatctaacatggtaaatcatgtatacgctaacatggtaaatcatgta

SEQ ID NO: 9416 - DNA, 139 bp, synthetic construct
  source 1..139: mol_type = other DNA
tacatgattttccatgtatacgcttacatgattttccatgtatgccgcttacatgattttccatgtatgcttttacatgattttccatgtatgatcttacatgattttccatgtatacgcttacatgattttccatgta

SEQ ID NO: 9417 - DNA, 139 bp, synthetic construct
  source 1..139: mol_type = other DNA
tacatggaaaatcatgtatacgcttacatggaaaatcatgtatgccgcttacatggaaaatcatgtatgcttttacatggaaaatcatgtatgatcttacatggaaaatcatgtatacgcttacatggaaaatcatgta

SEQ ID NO: 9418 - DNA, 139 bp, synthetic construct
  source 1..139: mol_type = other DNA
tacatgattttccatgtttacgcttacatgattttccatgtttgccgcttacatgattttccatgtttgcttttacatgattttccatgtttgatcttacatgattttccatgtttacgcttacatgattttccatgtt

SEQ ID NO: 9419 - DNA, 139 bp, synthetic construct
  source 1..139: mol_type = other DNA
aacatggaaaatcatgtatacgctaacatggaaaatcatgtatgccgctaacatggaaaatcatgtatgctttaacatggaaaatcatgtatgatctaacatggaaaatcatgtatacgctaacatggaaaatcatgta

SEQ ID NO: 9420 - DNA, 147 bp, synthetic construct
  source 1..147: mol_type = other DNA
agtttcattttcctgctttagtttcattttcctgatctagtttcattttcctacgctagtttcattttcctgccgctagtttcattttcctgctttagtttcattttcctgatctagtttcattttcctacgctagtttcattttcc

SEQ ID NO: 9421 - DNA, 147 bp, synthetic construct
  source 1..147: mol_type = other DNA
ggaaaatgaaacttgctttggaaaatgaaacttgatctggaaaatgaaacttacgctggaaaatgaaacttgccgctggaaaatgaaacttgctttggaaaatgaaacttgatctggaaaatgaaacttacgctggaaaatgaaact

SEQ ID NO: 9422 - DNA, 147 bp, synthetic construct
  source 1..147: mol_type = other DNA
agtttcattttcttgctttagtttcattttcttgatctagtttcattttcttacgctagtttcattttcttgccgctagtttcattttcttgctttagtttcattttcttgatctagtttcattttcttacgctagtttcattttct

SEQ ID NO: 9423 - DNA, 147 bp, synthetic construct
  source 1..147: mol_type = other DNA
agaaaatgaaacttgctttagaaaatgaaacttgatctagaaaatgaaacttacgctagaaaatgaaacttgccgctagaaaatgaaacttgctttagaaaatgaaacttgatctagaaaatgaaacttacgctagaaaatgaaact

SEQ ID NO: 9424 - DNA, 147 bp, synthetic construct
  source 1..147: mol_type = other DNA
agtttcgttttcctgctttagtttcgttttcctgatctagtttcgttttcctacgctagtttcgttttcctgccgctagtttcgttttcctgctttagtttcgttttcctgatctagtttcgttttcctacgctagtttcgttttcc

SEQ ID NO: 9425 - DNA, 147 bp, synthetic construct
  source 1..147: mol_type = other DNA
ggaaaacgaaacttgctttggaaaacgaaacttgatctggaaaacgaaacttacgctggaaaacgaaacttgccgctggaaaacgaaacttgctttggaaaacgaaacttgatctggaaaacgaaacttacgctggaaaacgaaact

SEQ ID NO: 9426 - DNA, 147 bp, synthetic construct
  source 1..147: mol_type = other DNA
agtttcgttttcttgctttagtttcgttttcttgatctagtttcgttttcttacgctagtttcgttttcttgccgctagtttcgttttcttgctttagtttcgttttcttgatctagtttcgttttcttacgctagtttcgttttct

SEQ ID NO: 9427 - DNA, 147 bp, synthetic construct
  source 1..147: mol_type = other DNA
agaaaacgaaacttgctttagaaaacgaaacttgatctagaaaacgaaacttacgctagaaaacgaaacttgccgctagaaaacgaaacttgctttagaaaacgaaacttgatctagaaaacgaaacttacgctagaaaacgaaact

SEQ ID NO: 9428 - DNA, 139 bp, synthetic construct
  source 1..139: mol_type = other DNA
gaaagtgaaagttgctttgaaagtgaaagttgatctgaaagtgaaagttacgctgaaagtgaaagttgccgctgaaagtgaaagttgctttgaaagtgaaagttgatctgaaagtgaaagttacgctgaaagtgaaagt

SEQ ID NO: 9429 - DNA, 139 bp, synthetic construct
  source 1..139: mol_type = other DNA
actttcactttctgctttactttcactttctgatctactttcactttctacgctactttcactttctgccgctactttcactttctgctttactttcactttctgatctactttcactttctacgctactttcactttc

SEQ ID NO: 9430 - DNA, 139 bp, synthetic construct
  source 1..139: mol_type = other DNA
gaaagtgaaacttgctttgaaagtgaaacttgatctgaaagtgaaacttacgctgaaagtgaaacttgccgctgaaagtgaaacttgctttgaaagtgaaacttgatctgaaagtgaaacttacgctgaaagtgaaact

SEQ ID NO: 9431 - DNA, 139 bp, synthetic construct
  source 1..139: mol_type = other DNA
agtttcactttctgctttagtttcactttctgatctagtttcactttctacgctagtttcactttctgccgctagtttcactttctgctttagtttcactttctgatctagtttcactttctacgctagtttcactttc

SEQ ID NO: 9432 - DNA, 139 bp, synthetic construct
  source 1..139: mol_type = other DNA
gaaactgaaagttgctttgaaactgaaagttgatctgaaactgaaagttacgctgaaactgaaagttgccgctgaaactgaaagttgctttgaaactgaaagttgatctgaaactgaaagttacgctgaaactgaaagt

SEQ ID NO: 9433 - DNA, 139 bp, synthetic construct
  source 1..139: mol_type = other DNA
actttcagtttctgctttactttcagtttctgatctactttcagtttctacgctactttcagtttctgccgctactttcagtttctgctttactttcagtttctgatctactttcagtttctacgctactttcagtttc

SEQ ID NO: 9434 - DNA, 139 bp, synthetic construct; identical to SEQ ID NO: 8323
  source 1..139: mol_type = other DNA

SEQ ID NO: 9435 - DNA, 139 bp, synthetic construct; identical to SEQ ID NO: 8322
  source 1..139: mol_type = other DNA

SEQ ID NO: 9436 - DNA, 139 bp, synthetic construct
  source 1..139: mol_type = other DNA
ggaagtgaaagttgctttggaagtgaaagttgatctggaagtgaaagttacgctggaagtgaaagttgccgctggaagtgaaagttgctttggaagtgaaagttgatctggaagtgaaagttacgctggaagtgaaagt

SEQ ID NO: 9437 - DNA, 139 bp, synthetic construct
  source 1..139: mol_type = other DNA
actttcacttcctgctttactttcacttcctgatctactttcacttcctacgctactttcacttcctgccgctactttcacttcctgctttactttcacttcctgatctactttcacttcctacgctactttcacttcc

SEQ ID NO: 9438 - DNA, 139 bp, synthetic construct
  source 1..139: mol_type = other DNA
ggaagtgaaacttgctttggaagtgaaacttgatctggaagtgaaacttacgctggaagtgaaacttgccgctggaagtgaaacttgctttggaagtgaaacttgatctggaagtgaaacttacgctggaagtgaaact

SEQ ID NO: 9439 - DNA, 139 bp, synthetic construct
  source 1..139: mol_type = other DNA
agtttcacttcctgctttagtttcacttcctgatctagtttcacttcctacgctagtttcacttcctgccgctagtttcacttcctgctttagtttcacttcctgatctagtttcacttcctacgctagtttcacttcc

SEQ ID NO: 9440 - DNA, 139 bp, synthetic construct
  source 1..139: mol_type = other DNA
ggaactgaaagttgctttggaactgaaagttgatctggaactgaaagttacgctggaactgaaagttgccgctggaactgaaagttgctttggaactgaaagttgatctggaactgaaagttacgctggaactgaaagt

SEQ ID NO: 9441 - DNA, 139 bp, synthetic construct
  source 1..139: mol_type = other DNA
actttcagttcctgctttactttcagttcctgatctactttcagttcctacgctactttcagttcctgccgctactttcagttcctgctttactttcagttcctgatctactttcagttcctacgctactttcagttcc

SEQ ID NO: 9442 - DNA, 139 bp, synthetic construct
  source 1..139: mol_type = other DNA
ggaactgaaacttgctttggaactgaaacttgatctggaactgaaacttacgctggaactgaaacttgccgctggaactgaaacttgctttggaactgaaacttgatctggaactgaaacttacgctggaactgaaact

SEQ ID NO: 9443 - DNA, 139 bp, synthetic construct
  source 1..139: mol_type = other DNA
agtttcagttcctgctttagtttcagttcctgatctagtttcagttcctacgctagtttcagttcctgccgctagtttcagttcctgctttagtttcagttcctgatctagtttcagttcctacgctagtttcagttcc

SEQ ID NO: 9444 - DNA, 140 bp, synthetic construct
  source 1..140: mol_type = other DNA
attttccatttgccgctattttccatttgctttattttccatttgatctattttccatttacgctattttccatttgccgctattttccatttgctttattttccatttgatctattttccatttacgctattttccatt

SEQ ID NO: 9445 - DNA, 140 bp, synthetic construct
  source 1..140: mol_type = other DNA
aatggaaaattgccgctaatggaaaattgctttaatggaaaattgatctaatggaaaattacgctaatggaaaattgccgctaatggaaaattgctttaatggaaaattgatctaatggaaaattacgctaatggaaaat

SEQ ID NO: 9446 - DNA, 139 bp, synthetic construct; identical to SEQ ID NO: 9436
  source 1..139: mol_type = other DNA

SEQ ID NO: 9447 - DNA, 139 bp, synthetic construct; identical to SEQ ID NO: 9437
  source 1..139: mol_type = other DNA

SEQ ID NO: 9448 - DNA, 139 bp, synthetic construct; identical to SEQ ID NO: 9438
  source 1..139: mol_type = other DNA

SEQ ID NO: 9449 - DNA, 139 bp, synthetic construct; identical to SEQ ID NO: 9439
  source 1..139: mol_type = other DNA

SEQ ID NO: 9450 - DNA, 140 bp, synthetic construct; identical to SEQ ID NO: 8624
  source 1..140: mol_type = other DNA

SEQ ID NO: 9451 - DNA, 140 bp, synthetic construct; identical to SEQ ID NO: 8625
  source 1..140: mol_type = other DNA

SEQ ID NO: 9452 - DNA, 139 bp, synthetic construct; identical to SEQ ID NO: 8492
  source 1..139: mol_type = other DNA

SEQ ID NO: 9453 - DNA, 139 bp, synthetic construct; identical to SEQ ID NO: 8493
  source 1..139: mol_type = other DNA

SEQ ID NO: 9454 - DNA, 140 bp, synthetic construct; identical to SEQ ID NO: 8928
  source 1..140: mol_type = other DNA

SEQ ID NO: 9455 - DNA, 140 bp, synthetic construct; identical to SEQ ID NO: 8929
  source 1..140: mol_type = other DNA

SEQ ID NO: 9456 - DNA, 140 bp, synthetic construct; identical to SEQ ID NO: 8930
  source 1..140: mol_type = other DNA

SEQ ID NO: 9457 - DNA, 140 bp, synthetic construct; identical to SEQ ID NO: 8931
  source 1..140: mol_type = other DNA

SEQ ID NO: 9458 - DNA, 146 bp, synthetic construct
  source 1..146: mol_type = other DNA
acttcctgatacgctacttcctgatgccgctacttcctgatgctttacttcctgatgatctacttcctgatacgctacttcctgatgccgctacttcctgatgctttacttcctgatgatctacttcctgatacgctacttcctga

SEQ ID NO: 9459 - DNA, 146 bp, synthetic construct
  source 1..146: mol_type = other DNA
tcaggaagttacgcttcaggaagttgccgcttcaggaagttgcttttcaggaagttgatcttcaggaagttacgcttcaggaagttgccgcttcaggaagttgcttttcaggaagttgatcttcaggaagttacgcttcaggaagt

SEQ ID NO: 9460 - DNA, 146 bp, synthetic construct
  source 1..146: mol_type = other DNA
acttcctgctacgctacttcctgctgccgctacttcctgctgctttacttcctgctgatctacttcctgctacgctacttcctgctgccgctacttcctgctgctttacttcctgctgatctacttcctgctacgctacttcctgc

SEQ ID NO: 9461 - DNA, 146 bp, synthetic construct
  source 1..146: mol_type = other DNA
gcaggaagttacgctgcaggaagttgccgctgcaggaagttgctttgcaggaagttgatctgcaggaagttacgctgcaggaagttgccgctgcaggaagttgctttgcaggaagttgatctgcaggaagttacgctgcaggaagt

SEQ ID NO: 9462 - DNA, 146 bp, synthetic construct
  source 1..146: mol_type = other DNA
acttcctgttacgctacttcctgttgccgctacttcctgttgctttacttcctgttgatctacttcctgttacgctacttcctgttgccgctacttcctgttgctttacttcctgttgatctacttcctgttacgctacttcctgt

SEQ ID NO: 9463 - DNA, 146 bp, synthetic construct
  source 1..146: mol_type = other DNA
acaggaagttacgctacaggaagttgccgctacaggaagttgctttacaggaagttgatctacaggaagttacgctacaggaagttgccgctacaggaagttgctttacaggaagttgatctacaggaagttacgctacaggaagt

SEQ ID NO: 9464 - DNA, 146 bp, synthetic construct
  source 1..146: mol_type = other DNA
atttcctgatacgctatttcctgatgccgctatttcctgatgctttatttcctgatgatctatttcctgatacgctatttcctgatgccgctatttcctgatgctttatttcctgatgatctatttcctgatacgctatttcctga

SEQ ID NO: 9465 - DNA, 146 bp, synthetic construct
  source 1..146: mol_type = other DNA
tcaggaaattacgcttcaggaaattgccgcttcaggaaattgcttttcaggaaattgatcttcaggaaattacgcttcaggaaattgccgcttcaggaaattgcttttcaggaaattgatcttcaggaaattacgcttcaggaaat

SEQ ID NO: 9466 - DNA, 146 bp, synthetic construct
  source 1..146: mol_type = other DNA
atttcctgctacgctatttcctgctgccgctatttcctgctgctttatttcctgctgatctatttcctgctacgctatttcctgctgccgctatttcctgctgctttatttcctgctgatctatttcctgctacgctatttcctgc

SEQ ID NO: 9467 - DNA, 146 bp, synthetic construct
  source 1..146: mol_type = other DNA
gcaggaaattacgctgcaggaaattgccgctgcaggaaattgctttgcaggaaattgatctgcaggaaattacgctgcaggaaattgccgctgcaggaaattgctttgcaggaaattgatctgcaggaaattacgctgcaggaaat

SEQ ID NO: 9468 - DNA, 146 bp, synthetic construct
  source 1..146: mol_type = other DNA
atttcctgttacgctatttcctgttgccgctatttcctgttgctttatttcctgttgatctatttcctgttacgctatttcctgttgccgctatttcctgttgctttatttcctgttgatctatttcctgttacgctatttcctgt

SEQ ID NO: 9469 - DNA, 146 bp, synthetic construct
  source 1..146: mol_type = other DNA
acaggaaattacgctacaggaaattgccgctacaggaaattgctttacaggaaattgatctacaggaaattacgctacaggaaattgccgctacaggaaattgctttacaggaaattgatctacaggaaattacgctacaggaaat

SEQ ID NO: 9470 - DNA, 130 bp, synthetic construct
  source 1..130: mol_type = other DNA
agaattagtgaactggaagattgccgctagaattagtgaactggaagattgctttagaattagtgaactggaagattgatctagaattagtgaactggaagattacgctagaattagtgaactggaagat

SEQ ID NO: 9471 - DNA, 130 bp, synthetic construct
  source 1..130: mol_type = other DNA
atcttccagttcactaattcttgccgctatcttccagttcactaattcttgctttatcttccagttcactaattcttgatctatcttccagttcactaattcttacgctatcttccagttcactaattct

SEQ ID NO: 9472 - DNA, 139 bp, synthetic construct
  source 1..139: mol_type = other DNA
aaactaggtcaatgctttaaactaggtcaatgatctaaactaggtcaatacgctaaactaggtcaatgccgctaaactaggtcaatgctttaaactaggtcaatgatctaaactaggtcaatacgctaaactaggtcaa

SEQ ID NO: 9473 - DNA, 139 bp, synthetic construct
  source 1..139: mol_type = other DNA
ttgacctagttttgctttttgacctagttttgatctttgacctagttttacgctttgacctagttttgccgctttgacctagttttgctttttgacctagttttgatctttgacctagttttacgctttgacctagttt

SEQ ID NO: 9474 - DNA, 139 bp, synthetic construct
  source 1..139: mol_type = other DNA
aaactaggtcactgctttaaactaggtcactgatctaaactaggtcactacgctaaactaggtcactgccgctaaactaggtcactgctttaaactaggtcactgatctaaactaggtcactacgctaaactaggtcac

SEQ ID NO: 9475 - DNA, 139 bp, synthetic construct
  source 1..139: mol_type = other DNA
gtgacctagttttgctttgtgacctagttttgatctgtgacctagttttacgctgtgacctagttttgccgctgtgacctagttttgctttgtgacctagttttgatctgtgacctagttttacgctgtgacctagttt

SEQ ID NO: 9476 - DNA, 139 bp, synthetic construct
  source 1..139: mol_type = other DNA
aaactaggtcagtgctttaaactaggtcagtgatctaaactaggtcagtacgctaaactaggtcagtgccgctaaactaggtcagtgctttaaactaggtcagtgatctaaactaggtcagtacgctaaactaggtcag

SEQ ID NO: 9477 - DNA, 139 bp, synthetic construct
  source 1..139: mol_type = other DNA
ctgacctagttttgctttctgacctagttttgatctctgacctagttttacgctctgacctagttttgccgctctgacctagttttgctttctgacctagttttgatctctgacctagttttacgctctgacctagttt

SEQ ID NO: 9478 - DNA, 139 bp, synthetic construct
  source 1..139: mol_type = other DNA
aaagtaggtcaatgctttaaagtaggtcaatgatctaaagtaggtcaatacgctaaagtaggtcaatgccgctaaagtaggtcaatgctttaaagtaggtcaatgatctaaagtaggtcaatacgctaaagtaggtcaa

SEQ ID NO: 9479 - DNA, 139 bp, synthetic construct
  source 1..139: mol_type = other DNA
ttgacctacttttgctttttgacctacttttgatctttgacctacttttacgctttgacctacttttgccgctttgacctacttttgctttttgacctacttttgatctttgacctacttttacgctttgacctacttt

SEQ ID NO: 9480 - DNA, 139 bp, synthetic construct
  source 1..139: mol_type = other DNA
aaagtaggtcactgctttaaagtaggtcactgatctaaagtaggtcactacgctaaagtaggtcactgccgctaaagtaggtcactgctttaaagtaggtcactgatctaaagtaggtcactacgctaaagtaggtcac

SEQ ID NO: 9481 - DNA, 139 bp, synthetic construct
  source 1..139: mol_type = other DNA
gtgacctacttttgctttgtgacctacttttgatctgtgacctacttttacgctgtgacctacttttgccgctgtgacctacttttgctttgtgacctacttttgatctgtgacctacttttacgctgtgacctacttt

SEQ ID NO: 9482 - DNA, 139 bp, synthetic construct
  source 1..139: mol_type = other DNA
aaagtaggtcagtgctttaaagtaggtcagtgatctaaagtaggtcagtacgctaaagtaggtcagtgccgctaaagtaggtcagtgctttaaagtaggtcagtgatctaaagtaggtcagtacgctaaagtaggtcag

SEQ ID NO: 9483 - DNA, 139 bp, synthetic construct
  source 1..139: mol_type = other DNA
ctgacctacttttgctttctgacctacttttgatctctgacctacttttacgctctgacctacttttgccgctctgacctacttttgctttctgacctacttttgatctctgacctacttttacgctctgacctacttt

SEQ ID NO: 9484 - DNA, 139 bp, synthetic construct
  source 1..139: mol_type = other DNA
aaattaggtcaatgctttaaattaggtcaatgatctaaattaggtcaatacgctaaattaggtcaatgccgctaaattaggtcaatgctttaaattaggtcaatgatctaaattaggtcaatacgctaaattaggtcaa

SEQ ID NO: 9485 - DNA, 139 bp, synthetic construct
  source 1..139: mol_type = other DNA
ttgacctaattttgctttttgacctaattttgatctttgacctaattttacgctttgacctaattttgccgctttgacctaattttgctttttgacctaattttgatctttgacctaattttacgctttgacctaattt

SEQ ID NO: 9486 - DNA, 139 bp, synthetic construct
  source 1..139: mol_type = other DNA
aaattaggtcactgctttaaattaggtcactgatctaaattaggtcactacgctaaattaggtcactgccgctaaattaggtcactgctttaaattaggtcactgatctaaattaggtcactacgctaaattaggtcac

SEQ ID NO: 9487 - DNA, 139 bp, synthetic construct
  source 1..139: mol_type = other DNA
gtgacctaattttgctttgtgacctaattttgatctgtgacctaattttacgctgtgacctaattttgccgctgtgacctaattttgctttgtgacctaattttgatctgtgacctaattttacgctgtgacctaattt

SEQ ID NO: 9488 - DNA, 139 bp, synthetic construct
  source 1..139: mol_type = other DNA
aaattaggtcagtgctttaaattaggtcagtgatctaaattaggtcagtacgctaaattaggtcagtgccgctaaattaggtcagtgctttaaattaggtcagtgatctaaattaggtcagtacgctaaattaggtcag

SEQ ID NO: 9489 - DNA, 139 bp, synthetic construct
  source 1..139: mol_type = other DNA
ctgacctaattttgctttctgacctaattttgatctctgacctaattttacgctctgacctaattttgccgctctgacctaattttgctttctgacctaattttgatctctgacctaattttacgctctgacctaattt

SEQ ID NO: 9490 - DNA, 139 bp, synthetic construct
  source 1..139: mol_type = other DNA
taactaggtcaatgcttttaactaggtcaatgatcttaactaggtcaatacgcttaactaggtcaatgccgcttaactaggtcaatgcttttaactaggtcaatgatcttaactaggtcaatacgcttaactaggtcaa

SEQ ID NO: 9491 - DNA, 139 bp, synthetic construct
  source 1..139: mol_type = other DNA
ttgacctagttatgctttttgacctagttatgatctttgacctagttatacgctttgacctagttatgccgctttgacctagttatgctttttgacctagttatgatctttgacctagttatacgctttgacctagtta

SEQ ID NO: 9492 - DNA, 139 bp, synthetic construct
  source 1..139: mol_type = other DNA
taactaggtcactgcttttaactaggtcactgatcttaactaggtcactacgcttaactaggtcactgccgcttaactaggtcactgcttttaactaggtcactgatcttaactaggtcactacgcttaactaggtcac

SEQ ID NO: 9493 - DNA, 139 bp, synthetic construct
  source 1..139: mol_type = other DNA
gtgacctagttatgctttgtgacctagttatgatctgtgacctagttatacgctgtgacctagttatgccgctgtgacctagttatgctttgtgacctagttatgatctgtgacctagttatacgctgtgacctagtta

SEQ ID NO: 9494 - DNA, 139 bp, synthetic construct
  source 1..139: mol_type = other DNA
taactaggtcagtgcttttaactaggtcagtgatcttaactaggtcagtacgcttaactaggtcagtgccgcttaactaggtcagtgcttttaactaggtcagtgatcttaactaggtcagtacgcttaactaggtcag

SEQ ID NO: 9495 - DNA, 139 bp, synthetic construct
  source 1..139: mol_type = other DNA
ctgacctagttatgctttctgacctagttatgatctctgacctagttatacgctctgacctagttatgccgctctgacctagttatgctttctgacctagttatgatctctgacctagttatacgctctgacctagtta

SEQ ID NO: 9496 - DNA, 139 bp, synthetic construct
  source 1..139: mol_type = other DNA
taagtaggtcaatgcttttaagtaggtcaatgatcttaagtaggtcaatacgcttaagtaggtcaatgccgcttaagtaggtcaatgcttttaagtaggtcaatgatcttaagtaggtcaatacgcttaagtaggtcaa

SEQ ID NO: 9497 - DNA, 139 bp, synthetic construct
  source 1..139: mol_type = other DNA
ttgacctacttatgctttttgacctacttatgatctttgacctacttatacgctttgacctacttatgccgctttgacctacttatgctttttgacctacttatgatctttgacctacttatacgctttgacctactta

SEQ ID NO: 9498 - DNA, 139 bp, synthetic construct
  source 1..139: mol_type = other DNA
taagtaggtcactgcttttaagtaggtcactgatcttaagtaggtcactacgcttaagtaggtcactgccgcttaagtaggtcactgcttttaagtaggtcactgatcttaagtaggtcactacgcttaagtaggtcac

SEQ ID NO: 9499 - DNA, 139 bp, synthetic construct
  source 1..139: mol_type = other DNA
gtgacctacttatgctttgtgacctacttatgatctgtgacctacttatacgctgtgacctacttatgccgctgtgacctacttatgctttgtgacctacttatgatctgtgacctacttatacgctgtgacctactta

SEQ ID NO: 9500 - DNA, 139 bp, synthetic construct
  source 1..139: mol_type = other DNA
taagtaggtcagtgcttttaagtaggtcagtgatcttaagtaggtcagtacgcttaagtaggtcagtgccgcttaagtaggtcagtgcttttaagtaggtcagtgatcttaagtaggtcagtacgcttaagtaggtcag

SEQ ID NO: 9501 - DNA, 139 bp, synthetic construct
  source 1..139: mol_type = other DNA
ctgacctacttatgctttctgacctacttatgatctctgacctacttatacgctctgacctacttatgccgctctgacctacttatgctttctgacctacttatgatctctgacctacttatacgctctgacctactta

SEQ ID NO: 9502 - DNA, 139 bp, synthetic construct
  source 1..139: mol_type = other DNA
taattaggtcaatgcttttaattaggtcaatgatcttaattaggtcaatacgcttaattaggtcaatgccgcttaattaggtcaatgcttttaattaggtcaatgatcttaattaggtcaatacgcttaattaggtcaa

SEQ ID NO: 9503 - DNA, 139 bp, synthetic construct
  source 1..139: mol_type = other DNA
ttgacctaattatgctttttgacctaattatgatctttgacctaattatacgctttgacctaattatgccgctttgacctaattatgctttttgacctaattatgatctttgacctaattatacgctttgacctaatta

SEQ ID NO: 9504 - DNA, 139 bp, synthetic construct
  source 1..139: mol_type = other DNA
taattaggtcactgcttttaattaggtcactgatcttaattaggtcactacgcttaattaggtcactgccgcttaattaggtcactgcttttaattaggtcactgatcttaattaggtcactacgcttaattaggtcac

SEQ ID NO: 9505 - DNA, 139 bp, synthetic construct
  source 1..139: mol_type = other DNA
gtgacctaattatgctttgtgacctaattatgatctgtgacctaattatacgctgtgacctaattatgccgctgtgacctaattatgctttgtgacctaattatgatctgtgacctaattatacgctgtgacctaatta

SEQ ID NO: 9506 - DNA, 139 bp, synthetic construct
  source 1..139: mol_type = other DNA
taattaggtcagtgcttttaattaggtcagtgatcttaattaggtcagtacgcttaattaggtcagtgccgcttaattaggtcagtgcttttaattaggtcagtgatcttaattaggtcagtacgcttaattaggtcag

SEQ ID NO: 9507 - DNA, 139 bp, synthetic construct
  source 1..139: mol_type = other DNA
ctgacctaattatgctttctgacctaattatgatctctgacctaattatacgctctgacctaattatgccgctctgacctaattatgctttctgacctaattatgatctctgacctaattatacgctctgacctaatta

SEQ ID NO: 9508 - DNA, 139 bp, synthetic construct; identical to SEQ ID NO: 8322
  source 1..139: mol_type = other DNA

SEQ ID NO: 9509 - DNA, 139 bp, synthetic construct; identical to SEQ ID NO: 8323
  source 1..139: mol_type = other DNA

SEQ ID NO: 9510 - DNA, 146 bp, synthetic construct
  source 1..146: mol_type = other DNA
aatttccactacgctaatttccactgccgctaatttccactgctttaatttccactgatctaatttccactacgctaatttccactgccgctaatttccactgctttaatttccactgatctaatttccactacgctaatttccac

SEQ ID NO: 9511 - DNA, 146 bp, synthetic construct
  source 1..146: mol_type = other DNA
gtggaaatttacgctgtggaaatttgccgctgtggaaatttgctttgtggaaatttgatctgtggaaatttacgctgtggaaatttgccgctgtggaaatttgctttgtggaaatttgatctgtggaaatttacgctgtggaaatt

SEQ ID NO: 9512 - DNA, 146 bp, synthetic construct
  source 1..146: mol_type = other DNA
aatttccattacgctaatttccattgccgctaatttccattgctttaatttccattgatctaatttccattacgctaatttccattgccgctaatttccattgctttaatttccattgatctaatttccattacgctaatttccat

SEQ ID NO: 9513 - DNA, 146 bp, synthetic construct
  source 1..146: mol_type = other DNA
atggaaatttacgctatggaaatttgccgctatggaaatttgctttatggaaatttgatctatggaaatttacgctatggaaatttgccgctatggaaatttgctttatggaaatttgatctatggaaatttacgctatggaaatt

SEQ ID NO: 9514 - DNA, 146 bp, synthetic construct
  source 1..146: mol_type = other DNA
aatttccgctacgctaatttccgctgccgctaatttccgctgctttaatttccgctgatctaatttccgctacgctaatttccgctgccgctaatttccgctgctttaatttccgctgatctaatttccgctacgctaatttccgc

SEQ ID NO: 9515 - DNA, 146 bp, synthetic construct
  source 1..146: mol_type = other DNA
gcggaaatttacgctgcggaaatttgccgctgcggaaatttgctttgcggaaatttgatctgcggaaatttacgctgcggaaatttgccgctgcggaaatttgctttgcggaaatttgatctgcggaaatttacgctgcggaaatt

SEQ ID NO: 9516 - DNA, 146 bp, synthetic construct
  source 1..146: mol_type = other DNA
aatttccgttacgctaatttccgttgccgctaatttccgttgctttaatttccgttgatctaatttccgttacgctaatttccgttgccgctaatttccgttgctttaatttccgttgatctaatttccgttacgctaatttccgt

SEQ ID NO: 9517 - DNA, 146 bp, synthetic construct
  source 1..146: mol_type = other DNA
acggaaatttacgctacggaaatttgccgctacggaaatttgctttacggaaatttgatctacggaaatttacgctacggaaatttgccgctacggaaatttgctttacggaaatttgatctacggaaatttacgctacggaaatt

SEQ ID NO: 9518 - DNA, 146 bp, synthetic construct
  source 1..146: mol_type = other DNA
tatttccactacgcttatttccactgccgcttatttccactgcttttatttccactgatcttatttccactacgcttatttccactgccgcttatttccactgcttttatttccactgatcttatttccactacgcttatttccac

SEQ ID NO: 9519 - DNA, 146 bp, synthetic construct
  source 1..146: mol_type = other DNA
gtggaaatatacgctgtggaaatatgccgctgtggaaatatgctttgtggaaatatgatctgtggaaatatacgctgtggaaatatgccgctgtggaaatatgctttgtggaaatatgatctgtggaaatatacgctgtggaaata

SEQ ID NO: 9520 - DNA, 146 bp, synthetic construct
  source 1..146: mol_type = other DNA
tatttccattacgcttatttccattgccgcttatttccattgcttttatttccattgatcttatttccattacgcttatttccattgccgcttatttccattgcttttatttccattgatcttatttccattacgcttatttccat

SEQ ID NO: 9521 - DNA, 146 bp, synthetic construct
  source 1..146: mol_type = other DNA
atggaaatatacgctatggaaatatgccgctatggaaatatgctttatggaaatatgatctatggaaatatacgctatggaaatatgccgctatggaaatatgctttatggaaatatgatctatggaaatatacgctatggaaata

SEQ ID NO: 9522 - DNA, 146 bp, synthetic construct
  source 1..146: mol_type = other DNA
tatttccgctacgcttatttccgctgccgcttatttccgctgcttttatttccgctgatcttatttccgctacgcttatttccgctgccgcttatttccgctgcttttatttccgctgatcttatttccgctacgcttatttccgc

SEQ ID NO: 9523 - DNA, 146 bp, synthetic construct
  source 1..146: mol_type = other DNA
gcggaaatatacgctgcggaaatatgccgctgcggaaatatgctttgcggaaatatgatctgcggaaatatacgctgcggaaatatgccgctgcggaaatatgctttgcggaaatatgatctgcggaaatatacgctgcggaaata

SEQ ID NO: 9524 - DNA, 146 bp, synthetic construct
  source 1..146: mol_type = other DNA
tatttccgttacgcttatttccgttgccgcttatttccgttgcttttatttccgttgatcttatttccgttacgcttatttccgttgccgcttatttccgttgcttttatttccgttgatcttatttccgttacgcttatttccgt

SEQ ID NO: 9525 - DNA, 146 bp, synthetic construct
  source 1..146: mol_type = other DNA
acggaaatatacgctacggaaatatgccgctacggaaatatgctttacggaaatatgatctacggaaatatacgctacggaaatatgccgctacggaaatatgctttacggaaatatgatctacggaaatatacgctacggaaata

SEQ ID NO: 9526 - DNA, 135 bp, synthetic construct
  source 1..135: mol_type = other DNA
ctggcaggctgccatgatctctggcaggctgccatacgctctggcaggctgccatgccgctctggcaggctgccatgctttctggcaggctgccatgatctctggcaggctgccatacgctctggcaggctgcca

SEQ ID NO: 9527 - DNA, 135 bp, synthetic construct
  source 1..135: mol_type = other DNA
tggcagcctgccagtgatcttggcagcctgccagtacgcttggcagcctgccagtgccgcttggcagcctgccagtgcttttggcagcctgccagtgatcttggcagcctgccagtacgcttggcagcctgccag

SEQ ID NO: 9528 - DNA, 146 bp, synthetic construct
  source 1..146: mol_type = other DNA
acttccggctacgctacttccggctgccgctacttccggctgctttacttccggctgatctacttccggctacgctacttccggctgccgctacttccggctgctttacttccggctgatctacttccggctacgctacttccggc

SEQ ID NO: 9529 - DNA, 146 bp, synthetic construct
  source 1..146: mol_type = other DNA
gccggaagttacgctgccggaagttgccgctgccggaagttgctttgccggaagttgatctgccggaagttacgctgccggaagttgccgctgccggaagttgctttgccggaagttgatctgccggaagttacgctgccggaagt

SEQ ID NO: 9530 - DNA, 146 bp, synthetic construct; identical to SEQ ID NO: 6667
  source 1..146: mol_type = other DNA

SEQ ID NO: 9531 - DNA, 146 bp, synthetic construct; identical to SEQ ID NO: 6666
  source 1..146: mol_type = other DNA

SEQ ID NO: 9532 - DNA, 146 bp, synthetic construct
  source 1..146: mol_type = other DNA
atttccggctacgctatttccggctgccgctatttccggctgctttatttccggctgatctatttccggctacgctatttccggctgccgctatttccggctgctttatttccggctgatctatttccggctacgctatttccggc

SEQ ID NO: 9533 - DNA, 146 bp, synthetic construct
  source 1..146: mol_type = other DNA
gccggaaattacgctgccggaaattgccgctgccggaaattgctttgccggaaattgatctgccggaaattacgctgccggaaattgccgctgccggaaattgctttgccggaaattgatctgccggaaattacgctgccggaaat

SEQ ID NO: 9534 - DNA, 146 bp, synthetic construct
  source 1..146: mol_type = other DNA
atttccggttacgctatttccggttgccgctatttccggttgctttatttccggttgatctatttccggttacgctatttccggttgccgctatttccggttgctttatttccggttgatctatttccggttacgctatttccggt

SEQ ID NO: 9535 - DNA, 146 bp, synthetic construct
  source 1..146: mol_type = other DNA
accggaaattacgctaccggaaattgccgctaccggaaattgctttaccggaaattgatctaccggaaattacgctaccggaaattgccgctaccggaaattgctttaccggaaattgatctaccggaaattacgctaccggaaat

SEQ ID NO: 9536 - DNA, 146 bp, synthetic construct
  source 1..146: mol_type = other DNA
gcttccggctacgctgcttccggctgccgctgcttccggctgctttgcttccggctgatctgcttccggctacgctgcttccggctgccgctgcttccggctgctttgcttccggctgatctgcttccggctacgctgcttccggc

SEQ ID NO: 9537 - DNA, 146 bp, synthetic construct
  source 1..146: mol_type = other DNA
gccggaagctacgctgccggaagctgccgctgccggaagctgctttgccggaagctgatctgccggaagctacgctgccggaagctgccgctgccggaagctgctttgccggaagctgatctgccggaagctacgctgccggaagc

SEQ ID NO: 9538 - DNA, 146 bp, synthetic construct
  source 1..146: mol_type = other DNA
gcttccggttacgctgcttccggttgccgctgcttccggttgctttgcttccggttgatctgcttccggttacgctgcttccggttgccgctgcttccggttgctttgcttccggttgatctgcttccggttacgctgcttccggt

SEQ ID NO: 9539 - DNA, 146 bp, synthetic construct
  source 1..146: mol_type = other DNA
accggaagctacgctaccggaagctgccgctaccggaagctgctttaccggaagctgatctaccggaagctacgctaccggaagctgccgctaccggaagctgctttaccggaagctgatctaccggaagctacgctaccggaagc

SEQ ID NO: 9540 - DNA, 146 bp, synthetic construct
  source 1..146: mol_type = other DNA
gtttccggctacgctgtttccggctgccgctgtttccggctgctttgtttccggctgatctgtttccggctacgctgtttccggctgccgctgtttccggctgctttgtttccggctgatctgtttccggctacgctgtttccggc

SEQ ID NO: 9541 - DNA, 146 bp, synthetic construct
  source 1..146: mol_type = other DNA
gccggaaactacgctgccggaaactgccgctgccggaaactgctttgccggaaactgatctgccggaaactacgctgccggaaactgccgctgccggaaactgctttgccggaaactgatctgccggaaactacgctgccggaaac

SEQ ID NO: 9542 - DNA, 146 bp, synthetic construct
  source 1..146: mol_type = other DNA
gtttccggttacgctgtttccggttgccgctgtttccggttgctttgtttccggttgatctgtttccggttacgctgtttccggttgccgctgtttccggttgctttgtttccggttgatctgtttccggttacgctgtttccggt

SEQ ID NO: 9543 - DNA, 146 bp, synthetic construct
  source 1..146: mol_type = other DNA
accggaaactacgctaccggaaactgccgctaccggaaactgctttaccggaaactgatctaccggaaactacgctaccggaaactgccgctaccggaaactgctttaccggaaactgatctaccggaaactacgctaccggaaac

SEQ ID NO: 9544 - DNA, 147 bp, synthetic construct
  source 1..147: mol_type = other DNA
cgaaaacgaaatttgctttcgaaaacgaaatttgatctcgaaaacgaaatttacgctcgaaaacgaaatttgccgctcgaaaacgaaatttgctttcgaaaacgaaatttgatctcgaaaacgaaatttacgctcgaaaacgaaatt

SEQ ID NO: 9545 - DNA, 147 bp, synthetic construct
  source 1..147: mol_type = other DNA
aatttcgttttcgtgctttaatttcgttttcgtgatctaatttcgttttcgtacgctaatttcgttttcgtgccgctaatttcgttttcgtgctttaatttcgttttcgtgatctaatttcgttttcgtacgctaatttcgttttcg

SEQ ID NO: 9546 - DNA, 147 bp, synthetic construct
  source 1..147: mol_type = other DNA
cgaaaatgaaatttgctttcgaaaatgaaatttgatctcgaaaatgaaatttacgctcgaaaatgaaatttgccgctcgaaaatgaaatttgctttcgaaaatgaaatttgatctcgaaaatgaaatttacgctcgaaaatgaaatt

SEQ ID NO: 9547 - DNA, 147 bp, synthetic construct
  source 1..147: mol_type = other DNA
aatttcattttcgtgctttaatttcattttcgtgatctaatttcattttcgtacgctaatttcattttcgtgccgctaatttcattttcgtgctttaatttcattttcgtgatctaatttcattttcgtacgctaatttcattttcg

SEQ ID NO: 9548 - DNA, 147 bp, synthetic construct
  source 1..147: mol_type = other DNA
cgaaagcgaaatttgctttcgaaagcgaaatttgatctcgaaagcgaaatttacgctcgaaagcgaaatttgccgctcgaaagcgaaatttgctttcgaaagcgaaatttgatctcgaaagcgaaatttacgctcgaaagcgaaatt

SEQ ID NO: 9549 - DNA, 147 bp, synthetic construct
  source 1..147: mol_type = other DNA
aatttcgctttcgtgctttaatttcgctttcgtgatctaatttcgctttcgtacgctaatttcgctttcgtgccgctaatttcgctttcgtgctttaatttcgctttcgtgatctaatttcgctttcgtacgctaatttcgctttcg

SEQ ID NO: 9550 - DNA, 147 bp, synthetic construct
  source 1..147: mol_type = other DNA
cgaaagtgaaatttgctttcgaaagtgaaatttgatctcgaaagtgaaatttacgctcgaaagtgaaatttgccgctcgaaagtgaaatttgctttcgaaagtgaaatttgatctcgaaagtgaaatttacgctcgaaagtgaaatt

SEQ ID NO: 9551 - DNA, 147 bp, synthetic construct
  source 1..147: mol_type = other DNA
aatttcactttcgtgctttaatttcactttcgtgatctaatttcactttcgtacgctaatttcactttcgtgccgctaatttcactttcgtgctttaatttcactttcgtgatctaatttcactttcgtacgctaatttcactttcg

SEQ ID NO: 9552 - DNA, 140 bp, synthetic construct; identical to SEQ ID NO: 8939
  source 1..140: mol_type = other DNA

SEQ ID NO: 9553 - DNA, 140 bp, synthetic construct; identical to SEQ ID NO: 8938
  source 1..140: mol_type = other DNA

SEQ ID NO: 9554 - DNA, 140 bp, synthetic construct; identical to SEQ ID NO: 8427
  source 1..140: mol_type = other DNA

SEQ ID NO: 9555 - DNA, 140 bp, synthetic construct; identical to SEQ ID NO: 8426
  source 1..140: mol_type = other DNA

SEQ ID NO: 9556 - DNA, 140 bp, synthetic construct; identical to SEQ ID NO: 8627
  source 1..140: mol_type = other DNA

SEQ ID NO: 9557 - DNA, 140 bp, synthetic construct; identical to SEQ ID NO: 8626
  source 1..140: mol_type = other DNA

SEQ ID NO: 9558 - DNA, 140 bp, synthetic construct; identical to SEQ ID NO: 8625
  source 1..140: mol_type = other DNA

SEQ ID NO: 9559 - DNA, 140 bp, synthetic construct; identical to SEQ ID NO: 8624
  source 1..140: mol_type = other DNA

SEQ ID NO: 9560 - DNA, 140 bp, synthetic construct
  source 1..140: mol_type = other DNA
aacttccggctgccgctaacttccggctgctttaacttccggctgatctaacttccggctacgctaacttccggctgccgctaacttccggctgctttaacttccggctgatctaacttccggctacgctaacttccggc

SEQ ID NO: 9561 - DNA, 140 bp, synthetic construct
  source 1..140: mol_type = other DNA
gccggaagtttgccgctgccggaagtttgctttgccggaagtttgatctgccggaagtttacgctgccggaagtttgccgctgccggaagtttgctttgccggaagtttgatctgccggaagtttacgctgccggaagtt

SEQ ID NO: 9562 - DNA, 140 bp, synthetic construct
  source 1..140: mol_type = other DNA
aacttccggttgccgctaacttccggttgctttaacttccggttgatctaacttccggttacgctaacttccggttgccgctaacttccggttgctttaacttccggttgatctaacttccggttacgctaacttccggt

SEQ ID NO: 9563 - DNA, 140 bp, synthetic construct
  source 1..140: mol_type = other DNA
accggaagtttgccgctaccggaagtttgctttaccggaagtttgatctaccggaagtttacgctaccggaagtttgccgctaccggaagtttgctttaccggaagtttgatctaccggaagtttacgctaccggaagtt

SEQ ID NO: 9564 - DNA, 140 bp, synthetic construct; identical to SEQ ID NO: 8611
  source 1..140: mol_type = other DNA

SEQ ID NO: 9565 - DNA, 140 bp, synthetic construct; identical to SEQ ID NO: 8610
  source 1..140: mol_type = other DNA

SEQ ID NO: 9566 - DNA, 140 bp, synthetic construct; identical to SEQ ID NO: 8609
  source 1..140: mol_type = other DNA

SEQ ID NO: 9567 - DNA, 140 bp, synthetic construct; identical to SEQ ID NO: 8608
  source 1..140: mol_type = other DNA

SEQ ID NO: 9568 - DNA, 140 bp, synthetic construct
  source 1..140: mol_type = other DNA
tacttccggctgccgcttacttccggctgcttttacttccggctgatcttacttccggctacgcttacttccggctgccgcttacttccggctgcttttacttccggctgatcttacttccggctacgcttacttccggc

SEQ ID NO: 9569 - DNA, 140 bp, synthetic construct
  source 1..140: mol_type = other DNA
gccggaagtatgccgctgccggaagtatgctttgccggaagtatgatctgccggaagtatacgctgccggaagtatgccgctgccggaagtatgctttgccggaagtatgatctgccggaagtatacgctgccggaagta

SEQ ID NO: 9570 - DNA, 140 bp, synthetic construct; identical to SEQ ID NO: 8921
  source 1..140: mol_type = other DNA

SEQ ID NO: 9571 - DNA, 140 bp, synthetic construct; identical to SEQ ID NO: 8920
  source 1..140: mol_type = other DNA

SEQ ID NO: 9572 - DNA, 140 bp, synthetic construct
  source 1..140: mol_type = other DNA
ggaaattccctgccgctggaaattccctgctttggaaattccctgatctggaaattccctacgctggaaattccctgccgctggaaattccctgctttggaaattccctgatctggaaattccctacgctggaaattccc

SEQ ID NO: 9573 - DNA, 140 bp, synthetic construct
  source 1..140: mol_type = other DNA
gggaatttcctgccgctgggaatttcctgctttgggaatttcctgatctgggaatttcctacgctgggaatttcctgccgctgggaatttcctgctttgggaatttcctgatctgggaatttcctacgctgggaatttcc

SEQ ID NO: 9574 - DNA, 142 bp, synthetic construct
  source 1..142: mol_type = other DNA
aacgaaaccgaaacttgatctaacgaaaccgaaacttacgctaacgaaaccgaaacttgccgctaacgaaaccgaaacttgctttaacgaaaccgaaacttgatctaacgaaaccgaaacttacgctaacgaaaccgaaact

SEQ ID NO: 9575 - DNA, 142 bp, synthetic construct
  source 1..142: mol_type = other DNA
agtttcggtttcgtttgatctagtttcggtttcgtttacgctagtttcggtttcgtttgccgctagtttcggtttcgtttgctttagtttcggtttcgtttgatctagtttcggtttcgtttacgctagtttcggtttcgtt

SEQ ID NO: 9576 - DNA, 139 bp, synthetic construct
  source 1..139: mol_type = other DNA
gaaagcgaaagctgctttgaaagcgaaagctgatctgaaagcgaaagctacgctgaaagcgaaagctgccgctgaaagcgaaagctgctttgaaagcgaaagctgatctgaaagcgaaagctacgctgaaagcgaaagc

SEQ ID NO: 9577 - DNA, 139 bp, synthetic construct
  source 1..139: mol_type = other DNA
gctttcgctttctgctttgctttcgctttctgatctgctttcgctttctacgctgctttcgctttctgccgctgctttcgctttctgctttgctttcgctttctgatctgctttcgctttctacgctgctttcgctttc

SEQ ID NO: 9578 - DNA, 139 bp, synthetic construct
  source 1..139: mol_type = other DNA
gaaagcgaaagttgctttgaaagcgaaagttgatctgaaagcgaaagttacgctgaaagcgaaagttgccgctgaaagcgaaagttgctttgaaagcgaaagttgatctgaaagcgaaagttacgctgaaagcgaaagt

SEQ ID NO: 9579 - DNA, 139 bp, synthetic construct
  source 1..139: mol_type = other DNA
actttcgctttctgctttactttcgctttctgatctactttcgctttctacgctactttcgctttctgccgctactttcgctttctgctttactttcgctttctgatctactttcgctttctacgctactttcgctttc

SEQ ID NO: 9580 - DNA, 139 bp, synthetic construct
  source 1..139: mol_type = other DNA
gaaagcgaaacctgctttgaaagcgaaacctgatctgaaagcgaaacctacgctgaaagcgaaacctgccgctgaaagcgaaacctgctttgaaagcgaaacctgatctgaaagcgaaacctacgctgaaagcgaaacc

SEQ ID NO: 9581 - DNA, 139 bp, synthetic construct
  source 1..139: mol_type = other DNA
ggtttcgctttctgctttggtttcgctttctgatctggtttcgctttctacgctggtttcgctttctgccgctggtttcgctttctgctttggtttcgctttctgatctggtttcgctttctacgctggtttcgctttc

SEQ ID NO: 9582 - DNA, 139 bp, synthetic construct
  source 1..139: mol_type = other DNA
gaaagcgaaacttgctttgaaagcgaaacttgatctgaaagcgaaacttacgctgaaagcgaaacttgccgctgaaagcgaaacttgctttgaaagcgaaacttgatctgaaagcgaaacttacgctgaaagcgaaact

SEQ ID NO: 9583 - DNA, 139 bp, synthetic construct
  source 1..139: mol_type = other DNA
agtttcgctttctgctttagtttcgctttctgatctagtttcgctttctacgctagtttcgctttctgccgctagtttcgctttctgctttagtttcgctttctgatctagtttcgctttctacgctagtttcgctttc

SEQ ID NO: 9584 - DNA, 139 bp, synthetic construct
  source 1..139: mol_type = other DNA
gaaagtgaaagctgctttgaaagtgaaagctgatctgaaagtgaaagctacgctgaaagtgaaagctgccgctgaaagtgaaagctgctttgaaagtgaaagctgatctgaaagtgaaagctacgctgaaagtgaaagc

SEQ ID NO: 9585 - DNA, 139 bp, synthetic construct
  source 1..139: mol_type = other DNA
gctttcactttctgctttgctttcactttctgatctgctttcactttctacgctgctttcactttctgccgctgctttcactttctgctttgctttcactttctgatctgctttcactttctacgctgctttcactttc

SEQ ID NO: 9586 - DNA, 139 bp, synthetic construct; identical to SEQ ID NO: 9428
  source 1..139: mol_type = other DNA

SEQ ID NO: 9587 - DNA, 139 bp, synthetic construct; identical to SEQ ID NO: 9429
  source 1..139: mol_type = other DNA

SEQ ID NO: 9588 - DNA, 139 bp, synthetic construct
  source 1..139: mol_type = other DNA
gaaagtgaaacctgctttgaaagtgaaacctgatctgaaagtgaaacctacgctgaaagtgaaacctgccgctgaaagtgaaacctgctttgaaagtgaaacctgatctgaaagtgaaacctacgctgaaagtgaaacc

SEQ ID NO: 9589 - DNA, 139 bp, synthetic construct
  source 1..139: mol_type = other DNA
ggtttcactttctgctttggtttcactttctgatctggtttcactttctacgctggtttcactttctgccgctggtttcactttctgctttggtttcactttctgatctggtttcactttctacgctggtttcactttc

SEQ ID NO: 9590 - DNA, 139 bp, synthetic construct; identical to SEQ ID NO: 9430
  source 1..139: mol_type = other DNA

SEQ ID NO: 9591 - DNA, 139 bp, synthetic construct; identical to SEQ ID NO: 9431
  source 1..139: mol_type = other DNA

SEQ ID NO: 9592 - DNA, 139 bp, synthetic construct
  source 1..139: mol_type = other DNA
gaaaccgaaagctgctttgaaaccgaaagctgatctgaaaccgaaagctacgctgaaaccgaaagctgccgctgaaaccgaaagctgctttgaaaccgaaagctgatctgaaaccgaaagctacgctgaaaccgaaagc

SEQ ID NO: 9593 - DNA, 139 bp, synthetic construct
  source 1..139: mol_type = other DNA
gctttcggtttctgctttgctttcggtttctgatctgctttcggtttctacgctgctttcggtttctgccgctgctttcggtttctgctttgctttcggtttctgatctgctttcggtttctacgctgctttcggtttc

SEQ ID NO: 9594 - DNA, 139 bp, synthetic construct
  source 1..139: mol_type = other DNA
gaaaccgaaagttgctttgaaaccgaaagttgatctgaaaccgaaagttacgctgaaaccgaaagttgccgctgaaaccgaaagttgctttgaaaccgaaagttgatctgaaaccgaaagttacgctgaaaccgaaagt

SEQ ID NO: 9595 - DNA, 139 bp, synthetic construct
  source 1..139: mol_type = other DNA
actttcggtttctgctttactttcggtttctgatctactttcggtttctacgctactttcggtttctgccgctactttcggtttctgctttactttcggtttctgatctactttcggtttctacgctactttcggtttc

SEQ ID NO: 9596 - DNA, 139 bp, synthetic construct
  source 1..139: mol_type = other DNA
gaaaccgaaacctgctttgaaaccgaaacctgatctgaaaccgaaacctacgctgaaaccgaaacctgccgctgaaaccgaaacctgctttgaaaccgaaacctgatctgaaaccgaaacctacgctgaaaccgaaacc

SEQ ID NO: 9597 - DNA, 139 bp, synthetic construct
  source 1..139: mol_type = other DNA
ggtttcggtttctgctttggtttcggtttctgatctggtttcggtttctacgctggtttcggtttctgccgctggtttcggtttctgctttggtttcggtttctgatctggtttcggtttctacgctggtttcggtttc

SEQ ID NO: 9598 - DNA, 139 bp, synthetic construct
  source 1..139: mol_type = other DNA
gaaaccgaaacttgctttgaaaccgaaacttgatctgaaaccgaaacttacgctgaaaccgaaacttgccgctgaaaccgaaacttgctttgaaaccgaaacttgatctgaaaccgaaacttacgctgaaaccgaaact

SEQ ID NO: 9599 - DNA, 139 bp, synthetic construct
  source 1..139: mol_type = other DNA
agtttcggtttctgctttagtttcggtttctgatctagtttcggtttctacgctagtttcggtttctgccgctagtttcggtttctgctttagtttcggtttctgatctagtttcggtttctacgctagtttcggtttc

SEQ ID NO: 9600 - DNA, 139 bp, synthetic construct
  source 1..139: mol_type = other DNA
gaaactgaaagctgctttgaaactgaaagctgatctgaaactgaaagctacgctgaaactgaaagctgccgctgaaactgaaagctgctttgaaactgaaagctgatctgaaactgaaagctacgctgaaactgaaagc

SEQ ID NO: 9601 - DNA, 139 bp, synthetic construct
  source 1..139: mol_type = other DNA
gctttcagtttctgctttgctttcagtttctgatctgctttcagtttctacgctgctttcagtttctgccgctgctttcagtttctgctttgctttcagtttctgatctgctttcagtttctacgctgctttcagtttc

SEQ ID NO: 9602 - DNA, 139 bp, synthetic construct; identical to SEQ ID NO: 9432
  source 1..139: mol_type = other DNA

SEQ ID NO: 9603 - DNA, 139 bp, synthetic construct; identical to SEQ ID NO: 9433
  source 1..139: mol_type = other DNA

SEQ ID NO: 9604 - DNA, 139 bp, synthetic construct
  source 1..139: mol_type = other DNA
gaaactgaaacctgctttgaaactgaaacctgatctgaaactgaaacctacgctgaaactgaaacctgccgctgaaactgaaacctgctttgaaactgaaacctgatctgaaactgaaacctacgctgaaactgaaacc

SEQ ID NO: 9605 - DNA, 139 bp, synthetic construct
  source 1..139: mol_type = other DNA
ggtttcagtttctgctttggtttcagtttctgatctggtttcagtttctacgctggtttcagtttctgccgctggtttcagtttctgctttggtttcagtttctgatctggtttcagtttctacgctggtttcagtttc

SEQ ID NO: 9606 - DNA, 139 bp, synthetic construct; identical to SEQ ID NO: 8323
  source 1..139: mol_type = other DNA

SEQ ID NO: 9607 - DNA, 139 bp, synthetic construct; identical to SEQ ID NO: 8322
  source 1..139: mol_type = other DNA

SEQ ID NO: 9608 - DNA, 140 bp, synthetic construct
  source 1..140: mol_type = other DNA
gtgaccttgatgccgctgtgaccttgatgctttgtgaccttgatgatctgtgaccttgatacgctgtgaccttgatgccgctgtgaccttgatgctttgtgaccttgatgatctgtgaccttgatacgctgtgaccttga

SEQ ID NO: 9609 - DNA, 140 bp, synthetic construct
  source 1..140: mol_type = other DNA
tcaaggtcactgccgcttcaaggtcactgcttttcaaggtcactgatcttcaaggtcactacgcttcaaggtcactgccgcttcaaggtcactgcttttcaaggtcactgatcttcaaggtcactacgcttcaaggtcac

SEQ ID NO: 9610 - DNA, 140 bp, synthetic construct
  source 1..140: mol_type = other DNA
aacaggaaattgccgctaacaggaaattgctttaacaggaaattgatctaacaggaaattacgctaacaggaaattgccgctaacaggaaattgctttaacaggaaattgatctaacaggaaattacgctaacaggaaat

SEQ ID NO: 9611 - DNA, 140 bp, synthetic construct
  source 1..140: mol_type = other DNA
atttcctgtttgccgctatttcctgtttgctttatttcctgtttgatctatttcctgtttacgctatttcctgtttgccgctatttcctgtttgctttatttcctgtttgatctatttcctgtttacgctatttcctgtt

SEQ ID NO: 9612 - DNA, 140 bp, synthetic construct
  source 1..140: mol_type = other DNA
aaaccacaaatgccgctaaaccacaaatgctttaaaccacaaatgatctaaaccacaaatacgctaaaccacaaatgccgctaaaccacaaatgctttaaaccacaaatgatctaaaccacaaatacgctaaaccacaaa

SEQ ID NO: 9613 - DNA, 140 bp, synthetic construct
  source 1..140: mol_type = other DNA
tttgtggttttgccgcttttgtggttttgcttttttgtggttttgatcttttgtggttttacgcttttgtggttttgccgcttttgtggttttgcttttttgtggttttgatcttttgtggttttacgcttttgtggttt

SEQ ID NO: 9614 - DNA, 146 bp, synthetic construct; identical to SEQ ID NO: 9468
  source 1..146: mol_type = other DNA

SEQ ID NO: 9615 - DNA, 146 bp, synthetic construct; identical to SEQ ID NO: 9469
  source 1..146: mol_type = other DNA

SEQ ID NO: 9616 - DNA, 140 bp, synthetic construct; identical to SEQ ID NO: 8608
  source 1..140: mol_type = other DNA

SEQ ID NO: 9617 - DNA, 140 bp, synthetic construct; identical to SEQ ID NO: 8609
  source 1..140: mol_type = other DNA

SEQ ID NO: 9618 - DNA, 139 bp, synthetic construct
  source 1..139: mol_type = other DNA
aggggatttccctgctttaggggatttccctgatctaggggatttccctacgctaggggatttccctgccgctaggggatttccctgctttaggggatttccctgatctaggggatttccctacgctaggggatttccc

SEQ ID NO: 9619 - DNA, 139 bp, synthetic construct
  source 1..139: mol_type = other DNA
gggaaatccccttgctttgggaaatccccttgatctgggaaatccccttacgctgggaaatccccttgccgctgggaaatccccttgctttgggaaatccccttgatctgggaaatccccttacgctgggaaatcccct

SEQ ID NO: 9620 - DNA, 139 bp, synthetic construct; identical to SEQ ID NO: 9428
  source 1..139: mol_type = other DNA

SEQ ID NO: 9621 - DNA, 139 bp, synthetic construct; identical to SEQ ID NO: 9429
  source 1..139: mol_type = other DNA

SEQ ID NO: 9622 - DNA, 149 bp, synthetic construct
  source 1..149: mol_type = other DNA
gacacgccccctgccgctgacacgccccctgctttgacacgccccctgatctgacacgccccctacgctgacacgccccctgccgctgacacgccccctgctttgacacgccccctgatctgacacgccccctacgctgacacgccccc

SEQ ID NO: 9623 - DNA, 149 bp, synthetic construct
  source 1..149: mol_type = other DNA
gggggcgtgtctgccgctgggggcgtgtctgctttgggggcgtgtctgatctgggggcgtgtctacgctgggggcgtgtctgccgctgggggcgtgtctgctttgggggcgtgtctgatctgggggcgtgtctacgctgggggcgtgtc

SEQ ID NO: 9624 - DNA, 149 bp, synthetic construct
  source 1..149: mol_type = other DNA
gccacgccccctgccgctgccacgccccctgctttgccacgccccctgatctgccacgccccctacgctgccacgccccctgccgctgccacgccccctgctttgccacgccccctgatctgccacgccccctacgctgccacgccccc

SEQ ID NO: 9625 - DNA, 149 bp, synthetic construct
  source 1..149: mol_type = other DNA
gggggcgtggctgccgctgggggcgtggctgctttgggggcgtggctgatctgggggcgtggctacgctgggggcgtggctgccgctgggggcgtggctgctttgggggcgtggctgatctgggggcgtggctacgctgggggcgtggc

SEQ ID NO: 9626 - DNA, 149 bp, synthetic construct
  source 1..149: mol_type = other DNA
acgcccacgcatgccgctacgcccacgcatgctttacgcccacgcatgatctacgcccacgcatacgctacgcccacgcatgccgctacgcccacgcatgctttacgcccacgcatgatctacgcccacgcatacgctacgcccacgca

SEQ ID NO: 9627 - DNA, 149 bp, synthetic construct
  source 1..149: mol_type = other DNA
tgcgtgggcgttgccgcttgcgtgggcgttgcttttgcgtgggcgttgatcttgcgtgggcgttacgcttgcgtgggcgttgccgcttgcgtgggcgttgcttttgcgtgggcgttgatcttgcgtgggcgttacgcttgcgtgggcgt

SEQ ID NO: 9628 - DNA, 149 bp, synthetic construct
  source 1..149: mol_type = other DNA
ccgcccacgcatgccgctccgcccacgcatgctttccgcccacgcatgatctccgcccacgcatacgctccgcccacgcatgccgctccgcccacgcatgctttccgcccacgcatgatctccgcccacgcatacgctccgcccacgca

SEQ ID NO: 9629 - DNA, 149 bp, synthetic construct
  source 1..149: mol_type = other DNA
tgcgtgggcggtgccgcttgcgtgggcggtgcttttgcgtgggcggtgatcttgcgtgggcggtacgcttgcgtgggcggtgccgcttgcgtgggcggtgcttttgcgtgggcggtgatcttgcgtgggcggtacgcttgcgtgggcgg

SEQ ID NO: 9630 - DNA, 149 bp, synthetic construct
  source 1..149: mol_type = other DNA
gggaatttccatgccgctgggaatttccatgctttgggaatttccatgatctgggaatttccatacgctgggaatttccatgccgctgggaatttccatgctttgggaatttccatgatctgggaatttccatacgctgggaatttcca

SEQ ID NO: 9631 - DNA, 149 bp, synthetic construct
  source 1..149: mol_type = other DNA
tggaaattccctgccgcttggaaattccctgcttttggaaattccctgatcttggaaattccctacgcttggaaattccctgccgcttggaaattccctgcttttggaaattccctgatcttggaaattccctacgcttggaaattccc

SEQ ID NO: 9632 - DNA, 149 bp, synthetic construct
  source 1..149: mol_type = other DNA
gggaatttccctgccgctgggaatttccctgctttgggaatttccctgatctgggaatttccctacgctgggaatttccctgccgctgggaatttccctgctttgggaatttccctgatctgggaatttccctacgctgggaatttccc

SEQ ID NO: 9633 - DNA, 149 bp, synthetic construct
  source 1..149: mol_type = other DNA
gggaaattccctgccgctgggaaattccctgctttgggaaattccctgatctgggaaattccctacgctgggaaattccctgccgctgggaaattccctgctttgggaaattccctgatctgggaaattccctacgctgggaaattccc

SEQ ID NO: 9634 - DNA, 149 bp, synthetic construct
  source 1..149: mol_type = other DNA
gggactttccatgccgctgggactttccatgctttgggactttccatgatctgggactttccatacgctgggactttccatgccgctgggactttccatgctttgggactttccatgatctgggactttccatacgctgggactttcca

SEQ ID NO: 9635 - DNA, 149 bp, synthetic construct
  source 1..149: mol_type = other DNA
tggaaagtccctgccgcttggaaagtccctgcttttggaaagtccctgatcttggaaagtccctacgcttggaaagtccctgccgcttggaaagtccctgcttttggaaagtccctgatcttggaaagtccctacgcttggaaagtccc

SEQ ID NO: 9636 - DNA, 149 bp, synthetic construct
  source 1..149: mol_type = other DNA
gggactttccctgccgctgggactttccctgctttgggactttccctgatctgggactttccctacgctgggactttccctgccgctgggactttccctgctttgggactttccctgatctgggactttccctacgctgggactttccc

SEQ ID NO: 9637 - DNA, 149 bp, synthetic construct
  source 1..149: mol_type = other DNA
gggaaagtccctgccgctgggaaagtccctgctttgggaaagtccctgatctgggaaagtccctacgctgggaaagtccctgccgctgggaaagtccctgctttgggaaagtccctgatctgggaaagtccctacgctgggaaagtccc

SEQ ID NO: 9638 - DNA, 149 bp, synthetic construct
  source 1..149: mol_type = other DNA
ggggatttccatgccgctggggatttccatgctttggggatttccatgatctggggatttccatacgctggggatttccatgccgctggggatttccatgctttggggatttccatgatctggggatttccatacgctggggatttcca

SEQ ID NO: 9639 - DNA, 149 bp, synthetic construct
  source 1..149: mol_type = other DNA
tggaaatcccctgccgcttggaaatcccctgcttttggaaatcccctgatcttggaaatcccctacgcttggaaatcccctgccgcttggaaatcccctgcttttggaaatcccctgatcttggaaatcccctacgcttggaaatcccc

SEQ ID NO: 9640 - DNA, 149 bp, synthetic construct
  source 1..149: mol_type = other DNA
ggggatttccctgccgctggggatttccctgctttggggatttccctgatctggggatttccctacgctggggatttccctgccgctggggatttccctgctttggggatttccctgatctggggatttccctacgctggggatttccc

SEQ ID NO: 9641 - DNA, 149 bp, synthetic construct
  source 1..149: mol_type = other DNA
gggaaatcccctgccgctgggaaatcccctgctttgggaaatcccctgatctgggaaatcccctacgctgggaaatcccctgccgctgggaaatcccctgctttgggaaatcccctgatctgggaaatcccctacgctgggaaatcccc

SEQ ID NO: 9642 - DNA, 149 bp, synthetic construct
  source 1..149: mol_type = other DNA
ggggctttccatgccgctggggctttccatgctttggggctttccatgatctggggctttccatacgctggggctttccatgccgctggggctttccatgctttggggctttccatgatctggggctttccatacgctggggctttcca

SEQ ID NO: 9643 - DNA, 149 bp, synthetic construct
  source 1..149: mol_type = other DNA
tggaaagcccctgccgcttggaaagcccctgcttttggaaagcccctgatcttggaaagcccctacgcttggaaagcccctgccgcttggaaagcccctgcttttggaaagcccctgatcttggaaagcccctacgcttggaaagcccc

SEQ ID NO: 9644 - DNA, 149 bp, synthetic construct
  source 1..149: mol_type = other DNA
ggggctttccctgccgctggggctttccctgctttggggctttccctgatctggggctttccctacgctggggctttccctgccgctggggctttccctgctttggggctttccctgatctggggctttccctacgctggggctttccc

SEQ ID NO: 9645 - DNA, 149 bp, synthetic construct
  source 1..149: mol_type = other DNA
gggaaagcccctgccgctgggaaagcccctgctttgggaaagcccctgatctgggaaagcccctacgctgggaaagcccctgccgctgggaaagcccctgctttgggaaagcccctgatctgggaaagcccctacgctgggaaagcccc

SEQ ID NO: 9646 - DNA, 140 bp, synthetic construct
  source 1..140: mol_type = other DNA
caaaccacagtgccgctcaaaccacagtgctttcaaaccacagtgatctcaaaccacagtacgctcaaaccacagtgccgctcaaaccacagtgctttcaaaccacagtgatctcaaaccacagtacgctcaaaccacag

SEQ ID NO: 9647 - DNA, 140 bp, synthetic construct
  source 1..140: mol_type = other DNA
ctgtggtttgtgccgctctgtggtttgtgctttctgtggtttgtgatctctgtggtttgtacgctctgtggtttgtgccgctctgtggtttgtgctttctgtggtttgtgatctctgtggtttgtacgctctgtggtttg

SEQ ID NO: 9648 - DNA, 136 bp, synthetic construct
  source 1..136: mol_type = other DNA
aaccacaatacgctaaccacaatgccgctaaccacaatgctttaaccacaatgatctaaccacaatacgctaaccacaatgccgctaaccacaatgctttaaccacaatgatctaaccacaatacgctaaccacaa

SEQ ID NO: 9649 - DNA, 136 bp, synthetic construct
  source 1..136: mol_type = other DNA
ttgtggtttacgctttgtggtttgccgctttgtggtttgctttttgtggtttgatctttgtggtttacgctttgtggtttgccgctttgtggtttgctttttgtggtttgatctttgtggtttacgctttgtggtt

SEQ ID NO: 9650 - DNA, 136 bp, synthetic construct
  source 1..136: mol_type = other DNA
aaccgcaatacgctaaccgcaatgccgctaaccgcaatgctttaaccgcaatgatctaaccgcaatacgctaaccgcaatgccgctaaccgcaatgctttaaccgcaatgatctaaccgcaatacgctaaccgcaa

SEQ ID NO: 9651 - DNA, 136 bp, synthetic construct
  source 1..136: mol_type = other DNA
ttgcggtttacgctttgcggtttgccgctttgcggtttgctttttgcggtttgatctttgcggtttacgctttgcggtttgccgctttgcggtttgctttttgcggtttgatctttgcggtttacgctttgcggtt

SEQ ID NO: 9652 - DNA, 146 bp, synthetic construct
  source 1..146: mol_type = other DNA
aaaccacaatacgctaaaccacaatgccgctaaaccacaatgctttaaaccacaatgatctaaaccacaatacgctaaaccacaatgccgctaaaccacaatgctttaaaccacaatgatctaaaccacaatacgctaaaccacaa

SEQ ID NO: 9653 - DNA, 146 bp, synthetic construct
  source 1..146: mol_type = other DNA
ttgtggttttacgctttgtggttttgccgctttgtggttttgctttttgtggttttgatctttgtggttttacgctttgtggttttgccgctttgtggttttgctttttgtggttttgatctttgtggttttacgctttgtggttt

SEQ ID NO: 9654 - DNA, 146 bp, synthetic construct
  source 1..146: mol_type = other DNA
aaaccacagtacgctaaaccacagtgccgctaaaccacagtgctttaaaccacagtgatctaaaccacagtacgctaaaccacagtgccgctaaaccacagtgctttaaaccacagtgatctaaaccacagtacgctaaaccacag

SEQ ID NO: 9655 - DNA, 146 bp, synthetic construct
  source 1..146: mol_type = other DNA
ctgtggttttacgctctgtggttttgccgctctgtggttttgctttctgtggttttgatctctgtggttttacgctctgtggttttgccgctctgtggttttgctttctgtggttttgatctctgtggttttacgctctgtggttt

SEQ ID NO: 9656 - DNA, 146 bp, synthetic construct
  source 1..146: mol_type = other DNA
aaaccacattacgctaaaccacattgccgctaaaccacattgctttaaaccacattgatctaaaccacattacgctaaaccacattgccgctaaaccacattgctttaaaccacattgatctaaaccacattacgctaaaccacat

SEQ ID NO: 9657 - DNA, 146 bp, synthetic construct
  source 1..146: mol_type = other DNA
atgtggttttacgctatgtggttttgccgctatgtggttttgctttatgtggttttgatctatgtggttttacgctatgtggttttgccgctatgtggttttgctttatgtggttttgatctatgtggttttacgctatgtggttt

SEQ ID NO: 9658 - DNA, 146 bp, synthetic construct
  source 1..146: mol_type = other DNA
taaccacaatacgcttaaccacaatgccgcttaaccacaatgcttttaaccacaatgatcttaaccacaatacgcttaaccacaatgccgcttaaccacaatgcttttaaccacaatgatcttaaccacaatacgcttaaccacaa

SEQ ID NO: 9659 - DNA, 146 bp, synthetic construct
  source 1..146: mol_type = other DNA
ttgtggttatacgctttgtggttatgccgctttgtggttatgctttttgtggttatgatctttgtggttatacgctttgtggttatgccgctttgtggttatgctttttgtggttatgatctttgtggttatacgctttgtggtta

SEQ ID NO: 9660 - DNA, 146 bp, synthetic construct
  source 1..146: mol_type = other DNA
taaccacagtacgcttaaccacagtgccgcttaaccacagtgcttttaaccacagtgatcttaaccacagtacgcttaaccacagtgccgcttaaccacagtgcttttaaccacagtgatcttaaccacagtacgcttaaccacag

SEQ ID NO: 9661 - DNA, 146 bp, synthetic construct
  source 1..146: mol_type = other DNA
ctgtggttatacgctctgtggttatgccgctctgtggttatgctttctgtggttatgatctctgtggttatacgctctgtggttatgccgctctgtggttatgctttctgtggttatgatctctgtggttatacgctctgtggtta

SEQ ID NO: 9662 - DNA, 146 bp, synthetic construct
  source 1..146: mol_type = other DNA
taaccacattacgcttaaccacattgccgcttaaccacattgcttttaaccacattgatcttaaccacattacgcttaaccacattgccgcttaaccacattgcttttaaccacattgatcttaaccacattacgcttaaccacat

SEQ ID NO: 9663 - DNA, 146 bp, synthetic construct
  source 1..146: mol_type = other DNA
atgtggttatacgctatgtggttatgccgctatgtggttatgctttatgtggttatgatctatgtggttatacgctatgtggttatgccgctatgtggttatgctttatgtggttatgatctatgtggttatacgctatgtggtta

SEQ ID NO: 9664 - DNA, 140 bp, synthetic construct; identical to SEQ ID NO: 8426
  source 1..140: mol_type = other DNA

SEQ ID NO: 9665 - DNA, 140 bp, synthetic construct; identical to SEQ ID NO: 8427
  source 1..140: mol_type = other DNA

SEQ ID NO: 9666 - DNA, 139 bp, synthetic construct; identical to SEQ ID NO: 5964
  source 1..139: mol_type = other DNA

SEQ ID NO: 9667 - DNA, 139 bp, synthetic construct; identical to SEQ ID NO: 5965
  source 1..139: mol_type = other DNA

SEQ ID NO: 9668 - DNA, 136 bp, synthetic construct
  source 1..136: mol_type = other DNA
aaaggtcatacgctaaaggtcatgccgctaaaggtcatgctttaaaggtcatgatctaaaggtcatacgctaaaggtcatgccgctaaaggtcatgctttaaaggtcatgatctaaaggtcatacgctaaaggtca

SEQ ID NO: 9669 - DNA, 136 bp, synthetic construct
  source 1..136: mol_type = other DNA
tgaccttttacgcttgaccttttgccgcttgaccttttgcttttgaccttttgatcttgaccttttacgcttgaccttttgccgcttgaccttttgcttttgaccttttgatcttgaccttttacgcttgaccttt

SEQ ID NO: 9670 - DNA, 146 bp, synthetic construct; identical to SEQ ID NO: 9652
  source 1..146: mol_type = other DNA

SEQ ID NO: 9671 - DNA, 146 bp, synthetic construct; identical to SEQ ID NO: 9653
  source 1..146: mol_type = other DNA

SEQ ID NO: 9672 - DNA, 146 bp, synthetic construct; identical to SEQ ID NO: 9654
  source 1..146: mol_type = other DNA

SEQ ID NO: 9673 - DNA, 146 bp, synthetic construct; identical to SEQ ID NO: 9655
  source 1..146: mol_type = other DNA

SEQ ID NO: 9674 - DNA, 146 bp, synthetic construct; identical to SEQ ID NO: 9658
  source 1..146: mol_type = other DNA

SEQ ID NO: 9675 - DNA, 146 bp, synthetic construct; identical to SEQ ID NO: 9659
  source 1..146: mol_type = other DNA

SEQ ID NO: 9676 - DNA, 146 bp, synthetic construct; identical to SEQ ID NO: 9660
  source 1..146: mol_type = other DNA

SEQ ID NO: 9677 - DNA, 146 bp, synthetic construct; identical to SEQ ID NO: 9661
  source 1..146: mol_type = other DNA

SEQ ID NO: 9678 - DNA, 140 bp, synthetic construct
  source 1..140: mol_type = other DNA
acaggaagtgtgccgctacaggaagtgtgctttacaggaagtgtgatctacaggaagtgtacgctacaggaagtgtgccgctacaggaagtgtgctttacaggaagtgtgatctacaggaagtgtacgctacaggaagtg

SEQ ID NO: 9679 - DNA, 140 bp, synthetic construct
  source 1..140: mol_type = other DNA
cacttcctgttgccgctcacttcctgttgctttcacttcctgttgatctcacttcctgttacgctcacttcctgttgccgctcacttcctgttgctttcacttcctgttgatctcacttcctgttacgctcacttcctgt

SEQ ID NO: 9680 - DNA, 146 bp, synthetic construct
  source 1..146: mol_type = other DNA
acttccggatacgctacttccggatgccgctacttccggatgctttacttccggatgatctacttccggatacgctacttccggatgccgctacttccggatgctttacttccggatgatctacttccggatacgctacttccgga

SEQ ID NO: 9681 - DNA, 146 bp, synthetic construct
  source 1..146: mol_type = other DNA
tccggaagttacgcttccggaagttgccgcttccggaagttgcttttccggaagttgatcttccggaagttacgcttccggaagttgccgcttccggaagttgcttttccggaagttgatcttccggaagttacgcttccggaagt

SEQ ID NO: 9682 - DNA, 146 bp, synthetic construct; identical to SEQ ID NO: 9528
  source 1..146: mol_type = other DNA

SEQ ID NO: 9683 - DNA, 146 bp, synthetic construct; identical to SEQ ID NO: 9529
  source 1..146: mol_type = other DNA

SEQ ID NO: 9684 - DNA, 146 bp, synthetic construct; identical to SEQ ID NO: 6667
  source 1..146: mol_type = other DNA

SEQ ID NO: 9685 - DNA, 146 bp, synthetic construct; identical to SEQ ID NO: 6666
  source 1..146: mol_type = other DNA

SEQ ID NO: 9686 - DNA, 146 bp, synthetic construct
  source 1..146: mol_type = other DNA
atttccggatacgctatttccggatgccgctatttccggatgctttatttccggatgatctatttccggatacgctatttccggatgccgctatttccggatgctttatttccggatgatctatttccggatacgctatttccgga

SEQ ID NO: 9687 - DNA, 146 bp, synthetic construct
  source 1..146: mol_type = other DNA
tccggaaattacgcttccggaaattgccgcttccggaaattgcttttccggaaattgatcttccggaaattacgcttccggaaattgccgcttccggaaattgcttttccggaaattgatcttccggaaattacgcttccggaaat

SEQ ID NO: 9688 - DNA, 146 bp, synthetic construct; identical to SEQ ID NO: 9532
  source 1..146: mol_type = other DNA

SEQ ID NO: 9689 - DNA, 146 bp, synthetic construct; identical to SEQ ID NO: 9533
  source 1..146: mol_type = other DNA

SEQ ID NO: 9690 - DNA, 146 bp, synthetic construct; identical to SEQ ID NO: 9534
  source 1..146: mol_type = other DNA

SEQ ID NO: 9691 - DNA, 146 bp, synthetic construct; identical to SEQ ID NO: 9535
  source 1..146: mol_type = other DNA

SEQ ID NO: 9692 - DNA, 146 bp, synthetic construct
  source 1..146: mol_type = other DNA
gcttccggatacgctgcttccggatgccgctgcttccggatgctttgcttccggatgatctgcttccggatacgctgcttccggatgccgctgcttccggatgctttgcttccggatgatctgcttccggatacgctgcttccgga

SEQ ID NO: 9693 - DNA, 146 bp, synthetic construct
  source 1..146: mol_type = other DNA
tccggaagctacgcttccggaagctgccgcttccggaagctgcttttccggaagctgatcttccggaagctacgcttccggaagctgccgcttccggaagctgcttttccggaagctgatcttccggaagctacgcttccggaagc

SEQ ID NO: 9694 - DNA, 146 bp, synthetic construct; identical to SEQ ID NO: 9536
  source 1..146: mol_type = other DNA

SEQ ID NO: 9695 - DNA, 146 bp, synthetic construct; identical to SEQ ID NO: 9537
  source 1..146: mol_type = other DNA

SEQ ID NO: 9696 - DNA, 146 bp, synthetic construct; identical to SEQ ID NO: 9538
  source 1..146: mol_type = other DNA

SEQ ID NO: 9697 - DNA, 146 bp, synthetic construct; identical to SEQ ID NO: 9539
  source 1..146: mol_type = other DNA

SEQ ID NO: 9698 - DNA, 146 bp, synthetic construct
  source 1..146: mol_type = other DNA
gtttccggatacgctgtttccggatgccgctgtttccggatgctttgtttccggatgatctgtttccggatacgctgtttccggatgccgctgtttccggatgctttgtttccggatgatctgtttccggatacgctgtttccgga

SEQ ID NO: 9699 - DNA, 146 bp, synthetic construct
  source 1..146: mol_type = other DNA
tccggaaactacgcttccggaaactgccgcttccggaaactgcttttccggaaactgatcttccggaaactacgcttccggaaactgccgcttccggaaactgcttttccggaaactgatcttccggaaactacgcttccggaaac

SEQ ID NO: 9700 - DNA, 146 bp, synthetic construct; identical to SEQ ID NO: 9540
  source 1..146: mol_type = other DNA

SEQ ID NO: 9701 - DNA, 146 bp, synthetic construct; identical to SEQ ID NO: 9541
  source 1..146: mol_type = other DNA

SEQ ID NO: 9702 - DNA, 146 bp, synthetic construct; identical to SEQ ID NO: 9542
  source 1..146: mol_type = other DNA

SEQ ID NO: 9703 - DNA, 146 bp, synthetic construct; identical to SEQ ID NO: 9543
  source 1..146: mol_type = other DNA

SEQ ID NO: 9704 - DNA, 140 bp, synthetic construct
  source 1..140: mol_type = other DNA
agaggaagtgtgccgctagaggaagtgtgctttagaggaagtgtgatctagaggaagtgtacgctagaggaagtgtgccgctagaggaagtgtgctttagaggaagtgtgatctagaggaagtgtacgctagaggaagtg

SEQ ID NO: 9705 - DNA, 140 bp, synthetic construct
  source 1..140: mol_type = other DNA
cacttcctcttgccgctcacttcctcttgctttcacttcctcttgatctcacttcctcttacgctcacttcctcttgccgctcacttcctcttgctttcacttcctcttgatctcacttcctcttacgctcacttcctct

SEQ ID NO: 9706 - DNA, 140 bp, synthetic construct
  source 1..140: mol_type = other DNA
ccgcccacgctgccgctccgcccacgctgctttccgcccacgctgatctccgcccacgctacgctccgcccacgctgccgctccgcccacgctgctttccgcccacgctgatctccgcccacgctacgctccgcccacgc

SEQ ID NO: 9707 - DNA, 140 bp, synthetic construct
  source 1..140: mol_type = other DNA
gcgtgggcggtgccgctgcgtgggcggtgctttgcgtgggcggtgatctgcgtgggcggtacgctgcgtgggcggtgccgctgcgtgggcggtgctttgcgtgggcggtgatctgcgtgggcggtacgctgcgtgggcgg

SEQ ID NO: 9708 - DNA, 140 bp, synthetic construct
  source 1..140: mol_type = other DNA
ccgcccccgctgccgctccgcccccgctgctttccgcccccgctgatctccgcccccgctacgctccgcccccgctgccgctccgcccccgctgctttccgcccccgctgatctccgcccccgctacgctccgcccccgc

SEQ ID NO: 9709 - DNA, 140 bp, synthetic construct
  source 1..140: mol_type = other DNA
gcgggggcggtgccgctgcgggggcggtgctttgcgggggcggtgatctgcgggggcggtacgctgcgggggcggtgccgctgcgggggcggtgctttgcgggggcggtgatctgcgggggcggtacgctgcgggggcgg

SEQ ID NO: 9710 - DNA, 140 bp, synthetic construct
  source 1..140: mol_type = other DNA
gctgtggttttgccgctgctgtggttttgctttgctgtggttttgatctgctgtggttttacgctgctgtggttttgccgctgctgtggttttgctttgctgtggttttgatctgctgtggttttacgctgctgtggttt

SEQ ID NO: 9711 - DNA, 140 bp, synthetic construct
  source 1..140: mol_type = other DNA
aaaccacagctgccgctaaaccacagctgctttaaaccacagctgatctaaaccacagctacgctaaaccacagctgccgctaaaccacagctgctttaaaccacagctgatctaaaccacagctacgctaaaccacagc

SEQ ID NO: 9712 - DNA, 140 bp, synthetic construct; identical to SEQ ID NO: 8426
  source 1..140: mol_type = other DNA

SEQ ID NO: 9713 - DNA, 140 bp, synthetic construct; identical to SEQ ID NO: 8427
  source 1..140: mol_type = other DNA

SEQ ID NO: 9714 - DNA, 140 bp, synthetic construct; identical to SEQ ID NO: 9678
  source 1..140: mol_type = other DNA

SEQ ID NO: 9715 - DNA, 140 bp, synthetic construct; identical to SEQ ID NO: 9679
  source 1..140: mol_type = other DNA

SEQ ID NO: 9716 - DNA, 139 bp, synthetic construct
  source 1..139: mol_type = other DNA
actcccacacactgctttactcccacacactgatctactcccacacactacgctactcccacacactgccgctactcccacacactgctttactcccacacactgatctactcccacacactacgctactcccacacac

SEQ ID NO: 9717 - DNA, 139 bp, synthetic construct
  source 1..139: mol_type = other DNA
gtgtgtgggagttgctttgtgtgtgggagttgatctgtgtgtgggagttacgctgtgtgtgggagttgccgctgtgtgtgggagttgctttgtgtgtgggagttgatctgtgtgtgggagttacgctgtgtgtgggagt

SEQ ID NO: 9718 - DNA, 139 bp, synthetic construct
  source 1..139: mol_type = other DNA
actcccacacagtgctttactcccacacagtgatctactcccacacagtacgctactcccacacagtgccgctactcccacacagtgctttactcccacacagtgatctactcccacacagtacgctactcccacacag

SEQ ID NO: 9719 - DNA, 139 bp, synthetic construct
  source 1..139: mol_type = other DNA
ctgtgtgggagttgctttctgtgtgggagttgatctctgtgtgggagttacgctctgtgtgggagttgccgctctgtgtgggagttgctttctgtgtgggagttgatctctgtgtgggagttacgctctgtgtgggagt

SEQ ID NO: 9720 - DNA, 139 bp, synthetic construct
  source 1..139: mol_type = other DNA
actcccacacattgctttactcccacacattgatctactcccacacattacgctactcccacacattgccgctactcccacacattgctttactcccacacattgatctactcccacacattacgctactcccacacat

SEQ ID NO: 9721 - DNA, 139 bp, synthetic construct
  source 1..139: mol_type = other DNA
atgtgtgggagttgctttatgtgtgggagttgatctatgtgtgggagttacgctatgtgtgggagttgccgctatgtgtgggagttgctttatgtgtgggagttgatctatgtgtgggagttacgctatgtgtgggagt

SEQ ID NO: 9722 - DNA, 139 bp, synthetic construct
  source 1..139: mol_type = other DNA
actcccacgcactgctttactcccacgcactgatctactcccacgcactacgctactcccacgcactgccgctactcccacgcactgctttactcccacgcactgatctactcccacgcactacgctactcccacgcac

SEQ ID NO: 9723 - DNA, 139 bp, synthetic construct
  source 1..139: mol_type = other DNA
gtgcgtgggagttgctttgtgcgtgggagttgatctgtgcgtgggagttacgctgtgcgtgggagttgccgctgtgcgtgggagttgctttgtgcgtgggagttgatctgtgcgtgggagttacgctgtgcgtgggagt

SEQ ID NO: 9724 - DNA, 139 bp, synthetic construct
  source 1..139: mol_type = other DNA
actcccacgcagtgctttactcccacgcagtgatctactcccacgcagtacgctactcccacgcagtgccgctactcccacgcagtgctttactcccacgcagtgatctactcccacgcagtacgctactcccacgcag

SEQ ID NO: 9725 - DNA, 139 bp, synthetic construct
  source 1..139: mol_type = other DNA
ctgcgtgggagttgctttctgcgtgggagttgatctctgcgtgggagttacgctctgcgtgggagttgccgctctgcgtgggagttgctttctgcgtgggagttgatctctgcgtgggagttacgctctgcgtgggagt

SEQ ID NO: 9726 - DNA, 139 bp, synthetic construct
  source 1..139: mol_type = other DNA
actcccacgcattgctttactcccacgcattgatctactcccacgcattacgctactcccacgcattgccgctactcccacgcattgctttactcccacgcattgatctactcccacgcattacgctactcccacgcat

SEQ ID NO: 9727 - DNA, 139 bp, synthetic construct
  source 1..139: mol_type = other DNA
atgcgtgggagttgctttatgcgtgggagttgatctatgcgtgggagttacgctatgcgtgggagttgccgctatgcgtgggagttgctttatgcgtgggagttgatctatgcgtgggagttacgctatgcgtgggagt

SEQ ID NO: 9728 - DNA, 139 bp, synthetic construct
  source 1..139: mol_type = other DNA
actcccccacactgctttactcccccacactgatctactcccccacactacgctactcccccacactgccgctactcccccacactgctttactcccccacactgatctactcccccacactacgctactcccccacac

SEQ ID NO: 9729 - DNA, 139 bp, synthetic construct
  source 1..139: mol_type = other DNA
gtgtgggggagttgctttgtgtgggggagttgatctgtgtgggggagttacgctgtgtgggggagttgccgctgtgtgggggagttgctttgtgtgggggagttgatctgtgtgggggagttacgctgtgtgggggagt

SEQ ID NO: 9730 - DNA, 139 bp, synthetic construct
  source 1..139: mol_type = other DNA
actcccccacagtgctttactcccccacagtgatctactcccccacagtacgctactcccccacagtgccgctactcccccacagtgctttactcccccacagtgatctactcccccacagtacgctactcccccacag

SEQ ID NO: 9731 - DNA, 139 bp, synthetic construct
  source 1..139: mol_type = other DNA
ctgtgggggagttgctttctgtgggggagttgatctctgtgggggagttacgctctgtgggggagttgccgctctgtgggggagttgctttctgtgggggagttgatctctgtgggggagttacgctctgtgggggagt

SEQ ID NO: 9732 - DNA, 139 bp, synthetic construct
  source 1..139: mol_type = other DNA
actcccccacattgctttactcccccacattgatctactcccccacattacgctactcccccacattgccgctactcccccacattgctttactcccccacattgatctactcccccacattacgctactcccccacat

SEQ ID NO: 9733 - DNA, 139 bp, synthetic construct
  source 1..139: mol_type = other DNA
atgtgggggagttgctttatgtgggggagttgatctatgtgggggagttacgctatgtgggggagttgccgctatgtgggggagttgctttatgtgggggagttgatctatgtgggggagttacgctatgtgggggagt

SEQ ID NO: 9734 - DNA, 139 bp, synthetic construct
  source 1..139: mol_type = other DNA
actcccccgcactgctttactcccccgcactgatctactcccccgcactacgctactcccccgcactgccgctactcccccgcactgctttactcccccgcactgatctactcccccgcactacgctactcccccgcac

SEQ ID NO: 9735 - DNA, 139 bp, synthetic construct
  source 1..139: mol_type = other DNA
gtgcgggggagttgctttgtgcgggggagttgatctgtgcgggggagttacgctgtgcgggggagttgccgctgtgcgggggagttgctttgtgcgggggagttgatctgtgcgggggagttacgctgtgcgggggagt

SEQ ID NO: 9736 - DNA, 139 bp, synthetic construct
  source 1..139: mol_type = other DNA
actcccccgcagtgctttactcccccgcagtgatctactcccccgcagtacgctactcccccgcagtgccgctactcccccgcagtgctttactcccccgcagtgatctactcccccgcagtacgctactcccccgcag

SEQ ID NO: 9737 - DNA, 139 bp, synthetic construct
  source 1..139: mol_type = other DNA
ctgcgggggagttgctttctgcgggggagttgatctctgcgggggagttacgctctgcgggggagttgccgctctgcgggggagttgctttctgcgggggagttgatctctgcgggggagttacgctctgcgggggagt

SEQ ID NO: 9738 - DNA, 139 bp, synthetic construct
  source 1..139: mol_type = other DNA
actcccccgcattgctttactcccccgcattgatctactcccccgcattacgctactcccccgcattgccgctactcccccgcattgctttactcccccgcattgatctactcccccgcattacgctactcccccgcat

SEQ ID NO: 9739 - DNA, 139 bp, synthetic construct
  source 1..139: mol_type = other DNA
atgcgggggagttgctttatgcgggggagttgatctatgcgggggagttacgctatgcgggggagttgccgctatgcgggggagttgctttatgcgggggagttgatctatgcgggggagttacgctatgcgggggagt

SEQ ID NO: 9740 - DNA, 139 bp, synthetic construct
  source 1..139: mol_type = other DNA
cctcccacacactgctttcctcccacacactgatctcctcccacacactacgctcctcccacacactgccgctcctcccacacactgctttcctcccacacactgatctcctcccacacactacgctcctcccacacac

SEQ ID NO: 9741 - DNA, 139 bp, synthetic construct
  source 1..139: mol_type = other DNA
gtgtgtgggaggtgctttgtgtgtgggaggtgatctgtgtgtgggaggtacgctgtgtgtgggaggtgccgctgtgtgtgggaggtgctttgtgtgtgggaggtgatctgtgtgtgggaggtacgctgtgtgtgggagg

SEQ ID NO: 9742 - DNA, 139 bp, synthetic construct
  source 1..139: mol_type = other DNA
cctcccacacagtgctttcctcccacacagtgatctcctcccacacagtacgctcctcccacacagtgccgctcctcccacacagtgctttcctcccacacagtgatctcctcccacacagtacgctcctcccacacag

SEQ ID NO: 9743 - DNA, 139 bp, synthetic construct
  source 1..139: mol_type = other DNA
ctgtgtgggaggtgctttctgtgtgggaggtgatctctgtgtgggaggtacgctctgtgtgggaggtgccgctctgtgtgggaggtgctttctgtgtgggaggtgatctctgtgtgggaggtacgctctgtgtgggagg

SEQ ID NO: 9744 - DNA, 139 bp, synthetic construct
  source 1..139: mol_type = other DNA
cctcccacacattgctttcctcccacacattgatctcctcccacacattacgctcctcccacacattgccgctcctcccacacattgctttcctcccacacattgatctcctcccacacattacgctcctcccacacat

SEQ ID NO: 9745 - DNA, 139 bp, synthetic construct
  source 1..139: mol_type = other DNA
atgtgtgggaggtgctttatgtgtgggaggtgatctatgtgtgggaggtacgctatgtgtgggaggtgccgctatgtgtgggaggtgctttatgtgtgggaggtgatctatgtgtgggaggtacgctatgtgtgggagg

SEQ ID NO: 9746 - DNA, 139 bp, synthetic construct
  source 1..139: mol_type = other DNA
cctcccacgcactgctttcctcccacgcactgatctcctcccacgcactacgctcctcccacgcactgccgctcctcccacgcactgctttcctcccacgcactgatctcctcccacgcactacgctcctcccacgcac

SEQ ID NO: 9747 - DNA, 139 bp, synthetic construct
  source 1..139: mol_type = other DNA
gtgcgtgggaggtgctttgtgcgtgggaggtgatctgtgcgtgggaggtacgctgtgcgtgggaggtgccgctgtgcgtgggaggtgctttgtgcgtgggaggtgatctgtgcgtgggaggtacgctgtgcgtgggagg

SEQ ID NO: 9748 - DNA, 139 bp, synthetic construct
  source 1..139: mol_type = other DNA
cctcccacgcagtgctttcctcccacgcagtgatctcctcccacgcagtacgctcctcccacgcagtgccgctcctcccacgcagtgctttcctcccacgcagtgatctcctcccacgcagtacgctcctcccacgcag

SEQ ID NO: 9749 - DNA, 139 bp, synthetic construct
  source 1..139: mol_type = other DNA
ctgcgtgggaggtgctttctgcgtgggaggtgatctctgcgtgggaggtacgctctgcgtgggaggtgccgctctgcgtgggaggtgctttctgcgtgggaggtgatctctgcgtgggaggtacgctctgcgtgggagg

SEQ ID NO: 9750 - DNA, 139 bp, synthetic construct
  source 1..139: mol_type = other DNA
cctcccacgcattgctttcctcccacgcattgatctcctcccacgcattacgctcctcccacgcattgccgctcctcccacgcattgctttcctcccacgcattgatctcctcccacgcattacgctcctcccacgcat

SEQ ID NO: 9751 - DNA, 139 bp, synthetic construct
  source 1..139: mol_type = other DNA
atgcgtgggaggtgctttatgcgtgggaggtgatctatgcgtgggaggtacgctatgcgtgggaggtgccgctatgcgtgggaggtgctttatgcgtgggaggtgatctatgcgtgggaggtacgctatgcgtgggagg

SEQ ID NO: 9752 - DNA, 139 bp, synthetic construct
  source 1..139: mol_type = other DNA
cctcccccacactgctttcctcccccacactgatctcctcccccacactacgctcctcccccacactgccgctcctcccccacactgctttcctcccccacactgatctcctcccccacactacgctcctcccccacac

SEQ ID NO: 9753 - DNA, 139 bp, synthetic construct
  source 1..139: mol_type = other DNA
gtgtgggggaggtgctttgtgtgggggaggtgatctgtgtgggggaggtacgctgtgtgggggaggtgccgctgtgtgggggaggtgctttgtgtgggggaggtgatctgtgtgggggaggtacgctgtgtgggggagg

SEQ ID NO: 9754 - DNA, 139 bp, synthetic construct
  source 1..139: mol_type = other DNA
cctcccccacagtgctttcctcccccacagtgatctcctcccccacagtacgctcctcccccacagtgccgctcctcccccacagtgctttcctcccccacagtgatctcctcccccacagtacgctcctcccccacag

SEQ ID NO: 9755 - DNA, 139 bp, synthetic construct
  source 1..139: mol_type = other DNA
ctgtgggggaggtgctttctgtgggggaggtgatctctgtgggggaggtacgctctgtgggggaggtgccgctctgtgggggaggtgctttctgtgggggaggtgatctctgtgggggaggtacgctctgtgggggagg

SEQ ID NO: 9756 - DNA, 139 bp, synthetic construct
  source 1..139: mol_type = other DNA
cctcccccacattgctttcctcccccacattgatctcctcccccacattacgctcctcccccacattgccgctcctcccccacattgctttcctcccccacattgatctcctcccccacattacgctcctcccccacat

SEQ ID NO: 9757 - DNA, 139 bp, synthetic construct
  source 1..139: mol_type = other DNA
atgtgggggaggtgctttatgtgggggaggtgatctatgtgggggaggtacgctatgtgggggaggtgccgctatgtgggggaggtgctttatgtgggggaggtgatctatgtgggggaggtacgctatgtgggggagg

SEQ ID NO: 9758 - DNA, 139 bp, synthetic construct
  source 1..139: mol_type = other DNA
cctcccccgcactgctttcctcccccgcactgatctcctcccccgcactacgctcctcccccgcactgccgctcctcccccgcactgctttcctcccccgcactgatctcctcccccgcactacgctcctcccccgcac

SEQ ID NO: 9759 - DNA, 139 bp, synthetic construct
  source 1..139: mol_type = other DNA
gtgcgggggaggtgctttgtgcgggggaggtgatctgtgcgggggaggtacgctgtgcgggggaggtgccgctgtgcgggggaggtgctttgtgcgggggaggtgatctgtgcgggggaggtacgctgtgcgggggagg

SEQ ID NO: 9760 - DNA, 139 bp, synthetic construct
  source 1..139: mol_type = other DNA
cctcccccgcagtgctttcctcccccgcagtgatctcctcccccgcagtacgctcctcccccgcagtgccgctcctcccccgcagtgctttcctcccccgcagtgatctcctcccccgcagtacgctcctcccccgcag

SEQ ID NO: 9761 - DNA, 139 bp, synthetic construct
  source 1..139: mol_type = other DNA
ctgcgggggaggtgctttctgcgggggaggtgatctctgcgggggaggtacgctctgcgggggaggtgccgctctgcgggggaggtgctttctgcgggggaggtgatctctgcgggggaggtacgctctgcgggggagg

SEQ ID NO: 9762 - DNA, 139 bp, synthetic construct
  source 1..139: mol_type = other DNA
cctcccccgcattgctttcctcccccgcattgatctcctcccccgcattacgctcctcccccgcattgccgctcctcccccgcattgctttcctcccccgcattgatctcctcccccgcattacgctcctcccccgcat

SEQ ID NO: 9763 - DNA, 139 bp, synthetic construct
  source 1..139: mol_type = other DNA
atgcgggggaggtgctttatgcgggggaggtgatctatgcgggggaggtacgctatgcgggggaggtgccgctatgcgggggaggtgctttatgcgggggaggtgatctatgcgggggaggtacgctatgcgggggagg

SEQ ID NO: 9764 - DNA, 146 bp, synthetic construct
  source 1..146: mol_type = other DNA
cgccccctctacgctcgccccctctgccgctcgccccctctgctttcgccccctctgatctcgccccctctacgctcgccccctctgccgctcgccccctctgctttcgccccctctgatctcgccccctctacgctcgccccctc

SEQ ID NO: 9765 - DNA, 146 bp, synthetic construct
  source 1..146: mol_type = other DNA
gagggggcgtacgctgagggggcgtgccgctgagggggcgtgctttgagggggcgtgatctgagggggcgtacgctgagggggcgtgccgctgagggggcgtgctttgagggggcgtgatctgagggggcgtacgctgagggggcg

SEQ ID NO: 9766 - DNA, 146 bp, synthetic construct
  source 1..146: mol_type = other DNA
ctccccctctacgctctccccctctgccgctctccccctctgctttctccccctctgatctctccccctctacgctctccccctctgccgctctccccctctgctttctccccctctgatctctccccctctacgctctccccctc

SEQ ID NO: 9767 - DNA, 146 bp, synthetic construct
  source 1..146: mol_type = other DNA
gagggggagtacgctgagggggagtgccgctgagggggagtgctttgagggggagtgatctgagggggagtacgctgagggggagtgccgctgagggggagtgctttgagggggagtgatctgagggggagtacgctgagggggag

SEQ ID NO: 9768 - DNA, 149 bp, synthetic construct
  source 1..149: mol_type = other DNA
gcgtgggcggatgccgctgcgtgggcggatgctttgcgtgggcggatgatctgcgtgggcggatacgctgcgtgggcggatgccgctgcgtgggcggatgctttgcgtgggcggatgatctgcgtgggcggatacgctgcgtgggcgga

SEQ ID NO: 9769 - DNA, 149 bp, synthetic construct
  source 1..149: mol_type = other DNA
tccgcccacgctgccgcttccgcccacgctgcttttccgcccacgctgatcttccgcccacgctacgcttccgcccacgctgccgcttccgcccacgctgcttttccgcccacgctgatcttccgcccacgctacgcttccgcccacgc

SEQ ID NO: 9770 - DNA, 149 bp, synthetic construct
  source 1..149: mol_type = other DNA
gcgtgggcgggtgccgctgcgtgggcgggtgctttgcgtgggcgggtgatctgcgtgggcgggtacgctgcgtgggcgggtgccgctgcgtgggcgggtgctttgcgtgggcgggtgatctgcgtgggcgggtacgctgcgtgggcggg

SEQ ID NO: 9771 - DNA, 149 bp, synthetic construct
  source 1..149: mol_type = other DNA
cccgcccacgctgccgctcccgcccacgctgctttcccgcccacgctgatctcccgcccacgctacgctcccgcccacgctgccgctcccgcccacgctgctttcccgcccacgctgatctcccgcccacgctacgctcccgcccacgc

SEQ ID NO: 9772 - DNA, 146 bp, synthetic construct
  source 1..146: mol_type = other DNA
cgcccacgctacgctcgcccacgctgccgctcgcccacgctgctttcgcccacgctgatctcgcccacgctacgctcgcccacgctgccgctcgcccacgctgctttcgcccacgctgatctcgcccacgctacgctcgcccacgc

SEQ ID NO: 9773 - DNA, 146 bp, synthetic construct
  source 1..146: mol_type = other DNA
gcgtgggcgtacgctgcgtgggcgtgccgctgcgtgggcgtgctttgcgtgggcgtgatctgcgtgggcgtacgctgcgtgggcgtgccgctgcgtgggcgtgctttgcgtgggcgtgatctgcgtgggcgtacgctgcgtgggcg

SEQ ID NO: 9774 - DNA, 146 bp, synthetic construct
  source 1..146: mol_type = other DNA
cgcccccgctacgctcgcccccgctgccgctcgcccccgctgctttcgcccccgctgatctcgcccccgctacgctcgcccccgctgccgctcgcccccgctgctttcgcccccgctgatctcgcccccgctacgctcgcccccgc

SEQ ID NO: 9775 - DNA, 146 bp, synthetic construct
  source 1..146: mol_type = other DNA
gcgggggcgtacgctgcgggggcgtgccgctgcgggggcgtgctttgcgggggcgtgatctgcgggggcgtacgctgcgggggcgtgccgctgcgggggcgtgctttgcgggggcgtgatctgcgggggcgtacgctgcgggggcg

SEQ ID NO: 9776 - DNA, 140 bp, synthetic construct
  source 1..140: mol_type = other DNA
tgcgtgggcgtgccgcttgcgtgggcgtgcttttgcgtgggcgtgatcttgcgtgggcgtacgcttgcgtgggcgtgccgcttgcgtgggcgtgcttttgcgtgggcgtgatcttgcgtgggcgtacgcttgcgtgggcg

SEQ ID NO: 9777 - DNA, 140 bp, synthetic construct
  source 1..140: mol_type = other DNA
cgcccacgcatgccgctcgcccacgcatgctttcgcccacgcatgatctcgcccacgcatacgctcgcccacgcatgccgctcgcccacgcatgctttcgcccacgcatgatctcgcccacgcatacgctcgcccacgca

SEQ ID NO: 9778 - DNA, 140 bp, synthetic construct
  source 1..140: mol_type = other DNA
tgcgtgggtgtgccgcttgcgtgggtgtgcttttgcgtgggtgtgatcttgcgtgggtgtacgcttgcgtgggtgtgccgcttgcgtgggtgtgcttttgcgtgggtgtgatcttgcgtgggtgtacgcttgcgtgggtg

SEQ ID NO: 9779 - DNA, 140 bp, synthetic construct
  source 1..140: mol_type = other DNA
cacccacgcatgccgctcacccacgcatgctttcacccacgcatgatctcacccacgcatacgctcacccacgcatgccgctcacccacgcatgctttcacccacgcatgatctcacccacgcatacgctcacccacgca

SEQ ID NO: 9780 - DNA, 139 bp, synthetic construct
  source 1..139: mol_type = other DNA
tgacctttgcattgcttttgacctttgcattgatcttgacctttgcattacgcttgacctttgcattgccgcttgacctttgcattgcttttgacctttgcattgatcttgacctttgcattacgcttgacctttgcat

SEQ ID NO: 9781 - DNA, 139 bp, synthetic construct
  source 1..139: mol_type = other DNA
atgcaaaggtcatgctttatgcaaaggtcatgatctatgcaaaggtcatacgctatgcaaaggtcatgccgctatgcaaaggtcatgctttatgcaaaggtcatgatctatgcaaaggtcatacgctatgcaaaggtca

SEQ ID NO: 9782-9785 - skipped (4 entries)

SEQ ID NO: 9786 - DNA, 216 bp, synthetic construct
  source 1..216: mol_type = other DNA
ggaggaaaaactgtttcatacagaaggcgtggaggaaaaactgtttcatacagaaggcgtggaggaaaaactgtttcatacagaaggcgtggaggaaaaactgtttcatacagaaggcgtgaattcagggctgggcataaaagtcagggcagagccatctattgcttacatttgcttctgacacaactgtgttcactagcaacctcaaacagacac

SEQ ID NO: 9787 - DNA, 197 bp, synthetic construct
  source 1..197: mol_type = other DNA
ggaggaaaaactgtttcatacagaaggcgtggaggaaaaactgtttcatacagaaggcgtggaggaaaaactgtttcatacagaaggcgtggaggaaaaactgtttcatacagaaggcgtgaattcctagagggtatataatgggggccactagtctactaccagaaagcttggtaccgagctcggatccagccacc

SEQ ID NO: 9788 - DNA, 28 bp, synthetic construct
  source 1..28: mol_type = other DNA
agagggtatataaaagctcgacttccag

SEQ ID NO: 9789 - DNA, 70 bp, synthetic construct
  source 1..70: mol_type = other DNA
tagagggtatataatgggggccactagtctactaccagaaagcttggtaccgagctcggatccagccacc

SEQ ID NO: 9790 - DNA, 71 bp, synthetic construct
  source 1..71: mol_type = other DNA
ctagagggtatataatgggggccactagtctactaccagaaagcttggtaccgagctcggatccagccacc

SEQ ID NO: 9791 - DNA, 10 bp, synthetic construct
  source 1..10: mol_type = other DNA
ygtctagaca

SEQ ID NO: 9792 - skipped

SEQ ID NO: 9793 - DNA, 11 bp, synthetic construct
  source 1..11: mol_type = other DNA
gaccacccang

SEQ ID NO: 9794-9796 - skipped (3 entries)

SEQ ID NO: 9797 - DNA, 10 bp, synthetic construct
  source 1..10: mol_type = other DNA
aaccggaagt

SEQ ID NO: 9798 - skipped

SEQ ID NO: 9799 - DNA, 10 bp, synthetic construct
  source 1..10: mol_type = other DNA
aaccggaagt

SEQ ID NO: 9800 - DNA, 10 bp, synthetic construct
  source 1..10: mol_type = other DNA
acaggaagtg

SEQ ID NO: 9801 - DNA, 43 bp, synthetic construct
  source 1..43: mol_type = other DNA
aaagcactcttaggcctctgcgtctcattctgaagactcacga

SEQ ID NO: 9802 - DNA, 43 bp, synthetic construct
  source 1..43: mol_type = other DNA
aacggagtcttcaacgtgagacggctcgatgccatagttcctt

SEQ ID NO: 9803 - DNA, 15 bp, synthetic construct
  source 1..15: mol_type = other DNA
yagtttcwytttycc

SEQ ID NO: 9804 - DNA, 18 bp, synthetic construct
  source 1..18: mol_type = other DNA
nnwnnngaantganswsn

SEQ ID NO: 9805 - DNA, 14 bp, synthetic construct
  source 1..14: mol_type = other DNA
nrtgastcatccnn

SEQ ID NO: 9806 - DNA, 21 bp, synthetic construct
  source 1..21: mol_type = other DNA
nssntgctgastcagcanssn

SEQ ID NO: 9807 - DNA, 15 bp, synthetic construct
  source 1..15: mol_type = other DNA
nnnasccggaagygw

SEQ ID NO: 9808 - DNA, 13 bp, synthetic construct
  source 1..13: mol_type = other DNA
sstatgcsaattw

SEQ ID NO: 9809 - DNA, 20 bp, synthetic construct
  source 1..20: mol_type = other DNA
sntgctgawtcagcaswtty

SEQ ID NO: 9810 - DNA, 11 bp, synthetic construct
  source 1..11: mol_type = other DNA
nttccwwagaa

SEQ ID NO: 9811 - DNA, 10 bp, synthetic construct
  source 1..10: mol_type = other DNA
vgctgwcavb

SEQ ID NO: 9812 - DNA, 18 bp, synthetic construct
  source 1..18: mol_type = other DNA
wgaaagygaaascnssnc

SEQ ID NO: 9813 - DNA, 14 bp, synthetic construct
  source 1..14: mol_type = other DNA
ctsyytccctccct

SEQ ID NO: 9814 - DNA, 24 bp, synthetic construct
  source 1..24: mol_type = other DNA
ccccckccccrstcwrgccynnnn

SEQ ID NO: 9815 - DNA, 12 bp, synthetic construct
  source 1..12: mol_type = other DNA
gctgastcagca